United States Patent Application Publication US 2025/0122497 A1 - sequence listing, part 2

SEQ ID NO: 5266 - DNA, 800503 bp, Homo sapiens
  source 1..800503: mol_type = genomic DNA
tgtttgctctgcagaatactttacctgggcacccaagtcttccttccagcattcctgctgctacagcctatttgctgagtaaccaggggttacagcagcgttgccaggcaacgagggacagcggtcctgttgaagagccatttgtcacactgaggggactggttgaaatgcaataaagaaatggtaactcagcttatttatcaatacaattacttgcacagtattagggatccatgtgtaacctacaaattcatagtcatatgaggaaacacagaaacattttgctaaatattaaagcataggacagacagatggtgttgggtttctaatcagctttactctgagcttaaagttgctgcacatgctgggataaggggaaaggcccaaagtcctttgccagctttattttgggcatctgtaagttagctctgggttacaatgtacagtgcatgtgtaaagaaaatctacaagattcttttccctgttaagtagagctggtaatgccattgctaattccctggggtgaagtaacaacacaaaattattgtatgtgtaatatattattaataattatatatatataaaacacacacatatattatataaatatttatgtataactggttataaatattactggttgtcctgtggacttataaagtgcttgatttgcccaatgcaatcaagagatttaccaaaaggatgagtattttactctgagcactgtgcttcaaaatgttttttgagaagttcagtagtgttgcttctaggagctcaaagtcctcaggcctgggatgagcttcagttttaaaggtgcagcagctttcccttgacgccctacgtttttgattcccagataccagcagctactcatgtcttcgccattgctaagaacgtcgttggtattaccttactctgagaacgtgtctgcagtttccagaaaatggagtatcgcaacatcacttaaagtaccctgcttcaaagtattgctggcaagtggcgtgggcctgattatttatttagaaatgctttatcaggaggagaatgcttttttgtaaacatgaattgcccagttctttcattgggctctggcttcttgtttcaggtcattgaaatgttgatctttgcctattttgcttcaatatccttgactgagtcacgaggtcttttcccaaggctggagaacgtgggagctttcaagaaagtttccatcgtgccaacccaagcagtatgtggactcccagaccgaagcactttttgtcacagctctgctgctgctgaaagtattcagttctgtacccagcggttttgtattcaggattgcccatacagatcttcacaccctacctacactgcccttttctcagcaggcctcagtagctgcatcacaccagacaagaatgatctgcatcctaacgcccatagcaattctgcaagttttatttttggaaatcacaagagctgcttttcttctcctccttctccaaagctgatggcatcatttaccttagctgtatggctgaaacctgagcaacaaggtgtaatgtaagtagtagtgtaggtataagctttcataggtccccaaaaccagtagtagtgaagatcatttcagcctgaattccaaaccggaagtgaaggctatatagaattcatggtattgaagactaactcttccagttgtttccccaattaaaatttttttctcttctatggatgaaatggaccatgaaaaaaaatgtgaaaatagtttatcaaaggcaaatgtgtttatgcaggaatcatttattttctatagcttagcgcgacctttggtcttagccttcaaagcctaaagaagactcagagtgagttttaaggcatggaaacttgtaattaatacaaataattaatattttcaaaatcttgaactgggtttatataatcaacatttccttactagggtataacattttcattaggcagatagttctcccagtccttgggactgttttcttcatcctcgtttccccaagaagagctgtttgtttgactcatggaagatgttcagtaatataaattgaatatataaataaccctccatctctaaaaacatatagcttttagttctttatcttgtggtattttcattttccaattagttaggaaatatgtaggtaagtgtgagagattctcaaaagctttcatgctgttcatcccagagaaatgccttcaatgagtctgggtcttattactgccattttttgttatttaatcaccagtttttcattctgtaatcttttctcaagctgatatctaatgagtttcttctaaatatttattgccaacctggagattttaatatacaggacagttttgaggaatttttgcttatcttttttcttcctagagggcttttggccctttctcttgtgacattttctgtgtgtgacagcgttggctggatatctaaaaacttgtgaaacaaaccagaaaaggattacaatctcataagcaaataggacttaaatgtttttggtgtttagtttcaatttgccaagtgaaagttggcatgtcttcattttgttttaaatttggattaatcacaaaattaatcacaaaccattcccatttctacatctctcctcaaagaaaaccttgttttcttactgtttgaaattctagtaaattcaagctactcagtttatataattaacatctgaagagtcttaaaacattgtcttttgacaaatagggctaagataaaatatccttctgagcttgtagggacatatctgtaccaaattcatcttctattgacatcattttgtataaataagacagagaagtatttacagggttggaagaacatggttaatggttttgagagttccttgtatcaaggtcgtttccattttcaaaattaaaatacctttgggaattgggggaatttcggggtgtttgcactagataagtaaaacaaacaaaacatggattatccaattattgtttattcaggagcagaataaatccagttcctaaatattttgctacctgccttcctctcacatttattatctaccaaagctagtatgtttacaagcaaacaaaatagcaaggaagataatcaataacatattaagaaatgcattttcagtaagcttgggaaaataagtctgcatttggtaaatacattcttgagtaatggtcgaattctcacttgtagatttaaacagaagaaaaatgaataggggcaaactcttttcaggttaagacctgatgggtagggataaaaacaaattcacttcagtaaattagaaatattcaactactgaagggttaaaaatataatttgcagtagaatttatataaaacttttatttctacttatataaaacctttatgtcatctaaatctatttgcctaaattaaaaatatacttgcactcataactttataccaaatatacatacaaaatatagtaaaattgtgacagtaaatgagggactattagtgttttacaatcttattcttacctcccaactcaggaaaaaaatagatgcaagtgatagatgcaagtgagaagaaattatgtgtgaaaaacatgccctttaaggaaagctttaaaccatctttagcagtaattcttgattggctcaattttatacatttgcctctctgatacttcctaccaaatttgatcacaaactcatcattttttgagagactactgtatcctaggtgtttgtgtgtgtatcctcagaatactcatgatctaaatgatctaatggagtgtacagatggatgagtgttattacctaggcagcacagtgtgttaagtgagcacaaagtgagacccctcaaccgaccctgagcaggaagaagggtgccaggaccaagcataatcattcagataccaaagctaagtaggaggtaaccaggtgaagaagagacctcaaggtctgaaaggtgtgtcactctaataagggtagagataacttaaaataatttgataactgccctgacacaagacctggaagttttctgaaaactcttctagtttttcaaaatcttatttcactgtgttctagaaggctgaaggacctttcacctcagatatttaacatgatctcagtacctcagttggactgtacggtcatggagaggtagccagtcatcttacagacactggctttggctttgtgccagttgatgatggggtgagtagagactatagctgtccattcttcatttcaccatgggaattaaatagagtgattctgacttcagggctaccaatttagagccttccatggacactaaatttgctttacattaaaaaaaaatttttgcactgatgacttaatactcaagcggcctgtagtgtgttgtaccacttcctctaaaagaaatagcaggagaactaatgagccaataacctaaatgttagttttgcagaatgattcaaccactttagtttccatcatgaatctctaatgaagggtgctgaggctctggggaatatattgtaaataagaattctattttttattgaaataaaggggcttcttcattggaataaagctttcattgaatataatgacattcaggcacttattcatagtacaccattttgagcaaagtttgaggtcattttaacaccactgtaactgcacaataccttagcatgtctttttggttggatgctgaccttttctctcttttccggttgcttcctaaggtgtgttatagaaaagacagtagatgggcagattgtgttcaaacttacaatatctgagaaagagaccatgttttattatcgcacagtaaatggtttgcaacctccaataaaagtaatgacactggggagaattcttgtgaagaaatggattcatcttagtgtgcaggtgagtaaaataaaaaatatttaacatttggttaaacacaaggatttgtcttcctttctctcttttaaatggcatctactcacaaaatctgcagcagtatcttttagatttcaggtgtgtataaatgacaactaaagaagaaaaatatttaaatgacctaatgatgtatctcttgatatactagcatttcctcccccaaaattgctgtaaaagctctcacagaaacttaaagacaatgctatctgtaattgtaatatcctcagaaaatttttgttttcttgggttcgtatattctattttgtttaaaaatgtgtaagggctcatttgatgtctggtactaattttactagtcatggatgtattaataccccagcttgatttttacatctgtctttctcagcagctgatgatgtgaataaaatttgtctgttgcattaaaatggtgaccttagaactaatgaactttacacttgaggcactcaaaaggtgttatattattattttagttgtcaaccacagtttgtatgagccttagaagctgctaaaggctgagagagctgtgacatgtctggtatttacagtctccagaagagaggcacagttcatccttttgttttttcagggcactggaatggcccaatacagttaaagccacacctgcctttcaaaccaggtgtattagtccattcttccactactataaaaaataccggagactgggtaatttattataaagaaaagaggttcaattggctcatggttctgtgggctatacaggaagcatgattctggcatctgctcagcttctggggagaccttagaaaacttacaatcacggcagcagacaaaggctgagcaagcacttcatgtggccagaatagggaggaaaagaaagaaagggaggtacttcacacttttaaaccaccagatctcatgagaattctatcaggagactagcactaggtggatggtgttaaagtactgatgagaaaacgtctacatgttccaataacctcccatcaggccccaccaccaaagctggggattacaattggacatgaggtttgggtggggacacagagccaaatcatgtaacttggggtgctgggtaccacagtttccagtatgagctctcatatgagcatccatccagtggctcatgtgaacctcatttgaactagaggacatttacatccttgttcattttataaaaattatctttgatttctcacttttttttttttttttaatcttgaagcagataatgagtgtgcgtcctcagagggtcttgataattgttcattgttttggctttcagatactaagatatgagtttagcaaatgtgattggcaggggtcagagttttcatacacaactagggttgaaatgatacacaaaggggacgtcatgtctgacgtcaagccttgtgcataggacatgatggtttctgattctcaatgcttattctccatgtgttcagtagttaacagataggagaccaatttgtcctagtcttgaagtttccattgtcttgaagtctccattctgcccactgaccagtcctacagaattgggttttaatattaaaaacgtagaaatagaaacttttaaagacagtgccatctttgcagaagatgccaaatagatatgtttgttgcatatttttgtatcaacaatgacaaaaaaattatctttacttgcctttattttgtgttatctgtgaaactgtgccatgttttggcaggcagtagtacattaaaagcttcacaaagaaagtttaaaatctaaatgcagagcggtaaccatgactgaattactcccttggggataaaatgctcttagagtgcctactgaaatcagcattatcatttcaatacatgtcaaatatgagtcatttactagtttaggcaaaatttcttcatgaatctttaaatctttctcttctttcaagaaaaggttaaagtacttatgatttaatgagactgctttatttcataactgtttgactatcaagagaaaacttgtccttttcgatttgtacactcttttatttatttttttgcataagttttaaactattctgcattttatattaaaactacagaactaggcagtcacaaaatgttagaaaaccattcagatctgtcatttaatcatctagcacttattaaatatttgaggggtatgcagcattatgggaatctggatttattcaaatgaaaattaaagagcaattatttactctaaaatggagctctatataaggttcctttatattggacaacagtctgaatatgtttaaggtattatgaaatttataaaaatccatattatagatttttttttgagacagagtttctcccttgttgcccaggctggagtgcaatggcatgatcttggctcactgcaacctccgtctcctgagttcaagagattatcctgcctcagcctcccaagtagctgagattacaggtgcctacaaccacactggctaattttttgtatttttagtagagaaggagtttcaccattgttggccaggctggtctcgaattcctgacctcaggtgatccacctgccttggcctcccaaagtgatggtattacaggcatgagccagagtgcccagcctagattttgaaaaaggaatgtactgattactcaaaagttgttataagaaataatggaggccaggcgcagtggttcatgcctgtaatcccagcattttgggaggtagaagtgaacggatagctcgaaccaggagttcgaggccagcctgggcaacatggcaaaacctcatctctacgaaaaaacaccctaaaaaaattagccaggtgtgatggtgcgtgtctgtagacccagctactcaggaggttggggctaaagtgaaaagatcacctaagcctggaagtcaaggcttcagtgacccatgatcatgccactgcattccagcctgggcgaaagagcaagatcctgtctgaaaaaaaaaaaaaaaaaaaaaaaaagtgacaggaaggacaggagattaggagttgggaaatctgatttaggttatgctactctgtagtcttaagaataaaatttataggaatccatatgatagttgtttaataaggaatgtactaattgcttaaacgttgttataagaagtaatggaagctgggcacagtggctcacacctataccctgcccgccttgacgtctcaaactgagtcatttgactcagttttcctatttacataagaagattgaactagatgaacaaaatgagggccttttgaattcttcataaacaagtaagtggagtgtggagtgtagcacaagtcattaaagtatggcaagctgttgagttgtgtagggttatttaggtagtaagtgacagagccagccccattaaccaatgatcagtcttgtgctttttttctcttctcccatgctgcttggcatttacataaaaacatttttttgctagattttctggacaaaatatagagaaatgtagattgttactattccattgtataactgcaagaacatttccagaaaaaatattttagtataaaatgtaacttactgttgcatgattatataatgcatctaaactccatttaatttggggattagggacttttatcatgctgggcataggacagaacaaatgattaataatcttgtttagtcaagtttcaaactacaaacctgcactttatgtatatgtggattttcacccatcttccaaatggccacaaattgatgaatttatatagtgtgtgtgtttctgtgcatgtgaaaaaataaaacatacaactctattcgtggaatggcccagaaaccagaattttagttcgttgcttatagtgattttttactggttagcttatacctggtggcataaaattaattagcagatctcaacttatgctttatctcagacagttcacttgtatcagctttccatcagtaaaatcagaattctaatttaccaaaatcagaaaaaaaattattttaaataattaaatatctgggggaaaagatgtcaggaaatccagacataccaaaattggaaatcgaatttcctaaacaaacaaatagacaatatgctcaatattgctatggtaatgaatctcacagcttttattccaaaactagcattttaaagtgtcaatctgttggaaaatgattagtgtttaaattaatattcatttatggacttgaatctgacaggattgccaattgaaattttactttggggtttaatatattggctatttcaaattatatcaagctaaaattcattgtgtcattttttatactaaaactagaaaaaatcaattcatagtttttattatcatatagggaacactgatcatattagcaaaatttttaaagcttagttttcatattaaatcagcacatgctgtagttataagatttcctttggttactcttataaaagttttgaaatatgtaaaaaaatttactttagcatttcgttatggattggtaggtaaaacaatatggaaataagtatatgtgtttagtggcatttcatttaaaagtaaaactttagggttttctttgacaatatattttgccttaagcagttccacacattttatagcccaaatagtgtcaaagaatcatcagtatagtcatccttctagtaattatgcagaattgcagtaaaacaattactacgatttgaagctgatgaaatactacagctgtggaaccaagaaatgatttagcattgggcttgttcacattttctatgctattttcagggctccttgatacattgacaattcaagagccatagatgactctagctacaatagtgtgaaaaagagcagttctaatatgatacaatgaagaaaaaaatgcatgggtaaataaagttttaggaatcaatatatgaaggataggagtttcataatcacagttcatgaagtatgctcttttgatttatgtattcaatctaagaaagaaaaactattgatagttctggaggaaaacaaaatgcaatttaaccaacatttgttagaatagataaaccaagtctctcaattaatctctgaactgtatgcccatgtgcacactttataaaggtgtttccatgttcctattgattgagggaacataaaacatccatgtcaccttatggaagcctcctcattcagttcagtaagctttatggcatagaattgtcataggaataccatcccagccccactcccattctaagagaatctcaacccatattatttctttaatatatcattgcatttagctctgactctgtgtgtgtgtgtatgtgtgtgtaagtatgcatgcatatgtgtgctaaatgtttctttgtgcaaagccttctctttatatctagccagctgggttaacagctcaagttagttgaatagttttgggttattcaaaataaattaagatcaatagaatataatgaagtttttcagaacaatcagttacaaattatcatagctgctattaatcattgatttatgtgcactatattaaacatgttacatatttgcagttatacaatgaaatagtgacatgcttgtaacatgtttaatatagtgttaataatagctctgtgccactgacttatattatctccatgacagagattttaaaaaattagccttaggaaatttaaactacctgcctacatttatagtcccaagcttctctgaccttaaactaaaagtaataacttgccatgaacatgggtcactgagcagatctaaataatagtttttaaaattctccaaaccaaaaaaaaaaggcacagaatcccaaaagaactgaaaacatatatttataatgtaaatataattttgtatatttatacatatttgtaatataaatattttcaatgcttcagatatttacatgatttatacaaataattaaagtcaatatattttttaactatacccctcattgatacaagcaatttaaatgtacaacagaatgtaattttgtataaagttctgcgcaatattttcatgttttatggcagttgcgatagactacaatggcttaaagaaagaatatttcccttaagccagcctgatcacctgacccatgccttatagaatcaacccttattacaataaaatacaaagaaggaagcacttcctactttattatggaagaggtaaaaccatccaagtaaaaaagtaattattctctgtacgttttttgcatgtgattttaaaatgcaatatttaagcagaaggcaaggctttaattcttgaccttttagtaaaaaattgtgcaaccctgggaaaactatgtaactcctcaaaatgttaggatacccattacaaattggaaacaaacaaacttggcctatttagcttacaccataaatttgaacatataaagaaaatattgtctactaaaacactttatagcctataacttcctgctatgaaggagcttacagtctcttcagaggataagcaatcaaataattacacaaataaaggcaaaattataattgtggtaagtgctacatgatcacatgaagaatgatttggtcaaaccactgaagtcaagaaaagcttccttgagtaaatgttattgaatatgtgtattagttttctaggcctgtactaaaaaattatcacaaactggtggcttaacacaacagttaattcattgttgaagagttctggaggctagaaagctgaaatcaagttgttagaagggccatgctctttctgaaacctctagaatccttccttgtctcttccagcatctggtgtttgcacagacaccagagtatgtgattgtgctacctcctggggtttgtctgcccacagcaaggccgggaacccagaaaagaaaagaggagtgcccagtgtagccaccacccactgcatgagaaacagagctggcagcaatccttgatgctccttagcttgtagctacatcactccagcctctgtctgcattatcatatggtcctctcctctgatcgtgtgtgtcttctcttcttataaggacatcagttgtactggattaggattcttcctaattcggtaggactcatcttaacaattacatccaaaaagacactacccaaataaggtcagagtcacaggcacatagggttagggcttcagtatgacttttgatgggacacagttcaactgatagtaagatttattcaaaagaatgcataggatccaactgggcaaagagaattgataagaacattccataaatgcatagcaaatagtgtaaatgcccttgtataaaaagaaatatgttacatagactaaaaaaccaaagtggttagagtgtcgctggcaaagtgggacatggtgtgaaatgaggacagaacagtaggaagaggctatgtgttaaagagaatcactggatatgttaagattttttttttaaatggaactctattgaactgttttatgtgaaggacaggagatgagggatgaggataaggaaggaaaacgtatgatatgcacagattattttttcctaaagatcactttggctgcagtgagggagaatggtttgcttgaagacaagtgtgaagggttgttatggtattttcatggaccaagtcagatgtaagtgttacttacttacagcatgaagacaatagtgaatatgcaaatgaatggtcagctttgagaggagtttaagaattaaattaaagggcttgttgatgaaggaatatgtaatatgagggaaagggagttgatgaatcccagctttctggcttatgtaattgcaggtacagtgatttctttttctcaaatagaaatactggaagagaatcagattttggatgtggagcacatatgaattagattccagtttagggtaataattctcaactatagaaattattagcattattgagaaactttaaaaaatattctgatgtccatatccctttatgtcttcattggtctaggtggggcgcaggcattatttctttctttcttccttccctgatggatttaaaaaggtgtaacaaaagaaaatatcagtctaccattgatgagcatttaggttggttccatatctttgctattgtgaacagtgctgcaacgaatatacatgtgcatgcgtctttatgatagaatgactcagattcctttggatatatacgcaggaatggaattgctgggtataatggtagttctgttttttttggtctttgaggaattgtcacactgttttctgtaatggttgaagtaatttacactcccaacatcagcctattaagcattcctttttctctgcaacctcactagcactgttgtttcttgactttttaataacagacattctgactgatgtgagatggtatctttcattgtggttttgattgacattgctctgatgatcagcgatcatatgcttgttggccacatgtatgtcttcttttgaaaagggtctatttatgtcctttgcccactttttaatagggttgtttttttcttgtagatttgttgaagtttgttatagaggccagctatcagacctttgccagatgtatagtttgcaaaacttttctctcactctataggttatctgttcactctgttgatagttcgttttgctgtgcagaagctctttaatttaatttgatcccatttgtcattgcttttggcatctctgtcgtgaaatctttgcctgttcctatttcctatgtccagaatgctattgcctagattgtctttcaggcttttagttttgggttttacgtttaagtctttattccaacttgagttgatttttatatatggtataaggaaggggtccagtttcaatcttctgcatatggctagccagttatcccaacatttattgaatagggagtcctttccccattgcttgtttttgtcagctttctcaaagatcagatggtggtaggtgtgatggccttatttctgggctctctattctttttcttcggtctatgtgtctgtttttgtaccagattcatgctgttttgcttactgtagccctgtagtatagtttgcagtcaagtaatgcaatgcctccacctttgttatttttgtgtaggattctctgtctatttgggctcatttttggttttatatgaatttaaaaagtttttttctagttattccaagaatgtcgttgtttgtttgatagaaatagcactgaatctgtaaattgctttgggcaatatggccattttaacgatattggtccttcctattcatgagcatggaatgtcacacaaaccaatgatatctgtttgtgtcatctctgatttatttgagcagtgctttgcatttctcattgtacagatctttcccctccctggttaactgtattcctggtattttattctttttgtggcgattgtttcacctgcttctaatcaaatctatttagtagctgttattaaactgtgtagccattagtatacagtagtactccattacccttggctttgctttctgttgtttgtcacccacagtcaaccacagtctgaaaatatcaaatggaaaatttcagaagtaaacaattcataagttttaaattgggtgctgttctgtgtagtgtgatgacatgtgaggtggtcaccatacctcctgcctgggaggtgaagcatccctttgtccagcagcttctccatattgtctatgctcctagcccttcagtcacatagtagctctcttagtaatcagatcagctgttgctgtatcacagttgtaacttgtgttcaaggaaactgtatttcacttcttaatggccccaaagtgcaataatagtaatgctggcaatttggctatgccaagaagccataaagtccctcttttaagtgaaaaggtaaacactctcaacttaacaaatgaaagagaaaagatcatatgctgaaattactaagaacttcagtgtaagaatgtatcttctgtccatgaaattctgaacaatgtattgttataattattctattttgatagttattgttaatctcttactgggcctaatttataaaaattaaactttatcttgggtatgtatgtataggaaaaaacatagcatatattgggttcagtaatatccacggtttcaggcattcactgggagtcttgcaacatatcctcaatggataaagggggactactgtatgcgcaatatatgtatacgcttaaaaagagttttgtttagctagtgtgtgtaagaagattatcacaagtcacactgtagtgtttgccttttgccagtctgaatgttatcatcagtctaatattttatagcaaagatttaagttcattgaaaacttccctatggaaacacttccaatcaagacctacagcaagccatgaataaattaacatttaaacatgaaaactgatatttgaagaagaattagcaattaataatttctgctagaaaatggtggtttctcagccaatagctataaattgtataatatatgtaaaaggaaatatatacaaatatcatatgggacatatatcacatatactactaaaattgaaaattgctataaatagaagactatgttccaatgtccactgatttttttttttttaacaatctctagtcttgaaaatgccactatggtaattctgtcaaatttgtaatggttgggatttgatggtagtgcttttgaaacctgtattatctaatggaattgtcatttatattatatcattttcacctaaaagccaaatacaataagacttaaattatttttgctttttttgtggatagtcatttttgtgcccaaagggctaactgatgccttcagttatacatgaacaattcgcactaacgtcaggaagaacagtgtgcatataacctagggcagaatttggtctatggaatgtatcactcagtagtggaatggagattatgactttatttaaacatggacttgagtagttttatttttccttactgtttcccttggcatttctttctctaaagtgcaacattcaaaagtattctatgcagctgtagtgtcctggatgcataataagggcatatgttcaaggcaagtttaaatatccacataagccaaagacagagtaattaacattaaaaaaattaagacaacttttccaagaatgaaaagctttaatagattagctaattttagaattatttaacaacaactgtgaaaaattattagtatttacaaatatgtatatataaatatatgtaatgtcttatgttagacagcaatttcattctgctctctaatgattacatgacatacttctgaaaaaagtcaaacagtgtgttctagaaggacaaagaaataattggttcagttttgcttatacttagtgttcaattgttatcaacctggggtgggaggaagggaaagaaagagggaaggacagaagagagcaagaaaagaaggaaggaggagaggaaggagagatggaagtcatgtgacatagctagggatttggggcaaaattcaagacccatgttttccttgatggaaagccaaggaacctgagaaggagagtcagcccatgccaatttcactgtggtagaggtgaccaagaaagtttacattatggatgtatagtaggtaattttaggttgtttttgtctgggatataaacccattgtgttattccagttatttggccaaaatgttccatgcaaccattttggagtgctagcactttagggaatttataaaaaggggtggtgttcagtgtctgggttgaatacaaggtaggtagaaaaggacaatcaaaggaattagctgcaaatgagatgaaatctatgggaacatatattgagaaaactagtgaccattataatttaatcctctgaaatacctgcaacaatctgagaacaaggtaggtggcaagatgcatttataaatattaaagaaacacaagaccccatacactttgaaaactggggagtaccgaacttggagaggtctagtataggtagtgcttgttggtttgcatatttttaaaaccactttattgaggtctgattgacatagaaaagtctgtccatgttgcatgtatgcaacttaatgagtctaaagataaatatatgcccatgaaagtatcaccataatctgtggcataaacatatccacctatttgtttattcttaattaaactttttcctgagataattgtaggttcacaggcacttgtgagaaataatacagaagtcccatgtaccctttactcatttgttctcatcagtaacatcttttataactatggtacaatattacgaccaggatatggacattaatataaccaatattattcacatttcccatttttcatatattcctatgtgtatatgtttagatccatatgattttattaaaattttatccaccacagccgagttgcagaaaagttccatccctacaaggacacctcaagctgcctttttataaccatgcccactgtctcccttcccctactgctgccacaggtgtccctaacttctggcaaccactcacttgtactctatttctaaaatttggtcttttcaaaatgttgtatacatgacatcacacaatatgtactcttttgggattgtttctttcttttttactcaacataattccgtggggattcattcaagttgttaagggcattgatagtccaccttattgcagcatagcattccacggtatgtgggtaccatggtttgtttaacccttcacccattgaaggacatctaggttaattctagttttgggttgtatcaaacacagttaaagcattcgtgtggatgtttttgttaacatacatattcgtttctctggaataaatgctcaagagtgcaatagcgtatggcagttgcatgtgtgtgttttaagaaactcatttccagagtggctgttccattttagaatcccaccagtgatgtatgagtgctccagattgtgcacatcctttgtagcatttaaaataaaggctacatttattttactatttaaaataacattttagccattctgatagataatatatcactgtggttttattttgcatttctttaatgactaatggtgttcagcatattttcatgtgcttatttaccattcatatgtccaattcggtgatgtctccccatgtcttctgcccattttctaatttgattgcttatttgtagcttgctgtttttattctttttacagggttttgctgagattgattaggtccaatttatcaatctttcctcttatgtattgtgttttccatgtcaagtctatgaagtcttgcctaaccctaaatcctgagtattttttctaaaagattttttttattttatattgttaaatttaagtatgtgtttcaggccaggcatggtggctcatgcctgtaatccccacacgtcaggatgctgaggtgggtgaattgcttgagcccaggacttcgagaccagcctgggcaccttgtctttacgaaaaattggctgggcatggtgctgtgtgtctgtagttccacctatgggggaggctgaggtgggagaatcagttgagctctggagtttgagaccagcctgggcaccttttctttacaaaacattggctgggcatggtgctgtgtgtctgtagttccacctatgggggaggctgaggtgggagaatcagttgagctctggagtttgagaccagcctgggcaacttggtgaaacctcgtctctactaaaaatacaaaaacaattagccaggcatagtggagtgcacctgtagtcccaactgctcaggagctgaggaaggaagatcacctgacctcaggaagttgaggctgctgtgagcagagatcatgccactgcactccagcctgggcaacagagtgagaccctgtcttaaaaaaaaaaaaaaaaaaaaagcctatgtttcactttgagttaatatttttttaaggtgtgagatttggttttgagcagtggatgtccaaatagcccttagttgaaaaggctatatccttccttcactgaattgctttggcacatttgtcaaaaattagtagaagatatttatgttgatttatttcagaattctatgtatatccttccaccaattccacatgttcttgagtactgtgagctataatatctagtagagcgactccttctactttatcctgctatttcaattacaaaaaataataaaccttttagggcctatgattttccatataaatttcacaataagcttgttgatgttttcaaaatatcttgtttagattttgataggaattgcattatatctatagatggatttggagtgatttgaaatcttttactatattgagtcctctaatatataaacatggtgtaagtatcaccatttaggtcctcttttattggcattttgtaatttttagcacatacattgtattagtctgttctcaccctgctataaagatactaccagagactgggtaatttataaagaaaagaggtttaattgacttggtttcacatggctggggaggcctcaggaaacttacaatcatggtggaaggtgaagggaaagcaaggaccttcctcacgtggcgtcaggagagagaagagtgaggtgtgaaggggaaagatccccttattaagccatcagatctcgtgagaactcactcactatcatgagaacagcatgtgggaaactgcccccatgatctaatcacctcccgccaggtgcctccctagacacgtggggattatggggattatacagttcaagatgatatttgggtggagacacagccaaactatatcatacatcctgcacctgttttgttgagcttacccataaagtgtttcattttctttttggtgattgtaattggttttgtgttttaaattttggcttctgcatgattattgttggtatatagcaatgttatgaattttctagggtgatcttgtatttcaaaactttgctgaactcacatttatagtagttctggaaattctttatttgttggaattttctacatagacaatcatgacatctgaatttggagcagtttttttaatctttccaatatgtagtttttatttctttttccttactgcagtgactagaatttttagtagtatgttgaataagaaaggtaagagcagagattcttgctcttcttgttcctaatcttaggaagaaaaagagttcaactttcaccattaagtatgatgttagctgtagattgtttgggtaagtgttctttatcaaattaatgaagttcctctctattcctaatttcttggagttttgagtattaaatattgtcacaaggcattttctgattcaattgatatgattatatgatttttcttctttagtctattaatgtggttgattacactgattgattttcaattgttgaaccaaccttacatacctgaaataaatcctacttggtcatagtatacaattatagtatatgtagtatacaattccttttatatagtgctgaattgatttgctcttctttctctagtttcttgaggtagaaacttaatgttttaagatccttcctcttttctcatataagtattagatttagcttagtgttgtaatttaatgtgtaatttaatttagtatttaatttagtttagtgcaataaatttccccttccacgctgctttagcagcatctgacatattttattatgttgtatgtttgactcttggacaaaatgagggcttggggtattgactcccgatggagttaaaaatttgcatttaacttttgaccaccccaaaatgtaactactaatagcctactgttgaatggaagccttaccaataagataaatggtccattaacacatattttgcatgttatatgttttacgtgctgtattcttataattaaatagagaaagaaaacattgttaagataattataaggaagataaatatatatttactattcattaagtgggagtggatcattatataagtcttcatgctcattattttcacattgagtaggctgaggaggaggagaaagaagggttggccttgttgtctcaggtggcaaaggcagaagaaaatttgtatataagtgaatctgtgtagttcaaacctgtgttgttcaaaggtcagctatattttcatgtgcattcagttctatgtttttgaaatttcctttgaggttttcaaaattttcttttacaactttctttttgactcatgggttatatagagatgtattgtttagtttcaaataaattggagattttaaatattataattctgttattgatttcaaatttgaatcattttcaatcagagaacacattcagtgtgaattcagttctttaacatttgttcaggattttttaacaggccagaatgtagtctatcttggtgaaagtttcacaagtatttgaaattaatgtgtatagtttgttttgtgtttacacacgcacacaaacacagatgcatacacatataaatcttctgttatctttttatttctatttaaagaacttcttttagtcattatttaagagtaggtgtgaagaaaaccaattctcttataaatagaactaagtacatctactttgtatacttttcttgagtgattctatattgtaatgatgtcctttttactagttctatcaattgctgagagtttgctgttgacgtccctgatttaattgtgggcttatctatttctcctttcagctgtatcagtcttgcttcatgcatgttaaagttctgttgttaggtgcatacatgtttaggatcattaggtctttctagtggagatatcattttatcattatgtaatgtccctcttaacctctagatatttggtttgttctgaaatctatgctatttgatagttactagttattccttttttcttttgattaatgtttgcagatatatttttctgattactaatttcaactgacctgtgttgatgtccatgaagtgaatgttgtacagatagcatattttttggatacttttttaaaaattaagtttatattctaatacactctgctaatctctgtcatttatttgtatatttagaccatttacatctgagattcttactgatatgctagccttatgtgtgcaattttattttttctatttcttgtctgttgtgggtctctgcatttctcttttctgaccttgctgtaggttacgtgaacacattttaggattctatcttggtgttttaacagcattttgggtatatcttttttgtatagtgtttttagtggctctaggtattaaagtatatgtaagtcacttatctactgacatggacatattactacttccattaaagtgtacttttatttccacttaggtcctttactcattctaccttttcagtataattgtcttaagtgtttcccctacatacagtgagcatcacattacactgagttgtaatttttgcttcaaccgtgaaatattatctagcaaactaataagagggaaagtctaacttatttccccctaattttattcattctgatattcttattttctttataagttctgaagcttttattatcattttgtttctatttaaagaacttcctttagtcatcctttaagaatgggtttgatgaaaacaaatactcttatttttcactcatctgagagtgtcttgatttttccttcattccgaaaggatatttttgctggatataaaatttatgattgacagttaattgctttcattacttgataaatgttgtgccactccttctggcttctaatttttcagatgagaaatctgttgtcatttgaactggtatttacttataagttttacatcattcctctggctgctttcaaggttttctctttgcttgttttgtatttagcagtttaatagtgaaagccctagcatgagtttccttggttttatcctattgtatgagatttgctcagcttcttgcatgtgtttgttaatgtcttttgccatattttcagtattttcagacattctttcttgaatacattttcactgccattctctcctcttattctaggattccagttatacaaatgttaactcttttgtttttaactcactggttcttgaagctctcttcaagtttttttttttccttttaatctctcttttcttatttgttcaaattaggtaaattcttttgatttccttcaggttcaggaatcctgtcatcttcctgttacccttgaacccatatagcaagtttgagtttgtttcaatggttgtatgtttcagttatttagtttccgtttggatcttttatatatatatatatatatataacttctatttctatgctggggtttctctcattttttttcttgcttgaaagaattcacaattgcttgttgatgcatttttattgtatctggtttaaaatccttgcctgataattccaacatatgattcatatcactgatggcatctgttgatcttcttctttcattcaagttgttattttgatggttcttagtatgacaagtgatttttattatatcctggatgttttgggtatcgtagtatgagactctggatccaaattcatcttctttttttattcagaagctgtccttacattgaggtgtgcacagaggccaggtgggtgtgtatgttcattcatcaccccgttgtcactgccaacatcatccagcagaagtggagcactgactcacactgcagcagatgggtagggtgaaacttcagcttccctgttgaccccttcccagtgaaagcgggccgcctattgctgctgccttgttgcccctcatggtgacatattcctaactccccactgagccacggaagggaaaaattcattgcttgttcacactactttgttgctgcagggtaggggtggaagctgagcttcctgctggtctctgtgacaccaggggaggtggggaatggagtgtcaagtaaccctcctcctatcaccttattctgcctcattgatgccaggtgtgagagaaggttctgcttctctccagaactctcccagttcttgtgaactgggtccaattcacaagaaagggaaaaaggatgtagagtattgattggccctaacacctagcacacagtctcactaataccactgggagtaggggctcagctcccctctaggccctgctcacttagtgagggtggggtgggaacagaatggagactaaccctgacacacaccacctcatgtggtcttgtgctgtgaagagagtggagaggttcattccctccttggtcccactgacaccagaggttggagtaaagtaaagtgctgatgagccctgactctcgtgtccttgtttagtcttgttaatattgggtggatgttgagcttcagctcctgactggggccctgccagagccggggggaatgtaatgtgctgactagtcctgccttgcaccacttcactaagtcttgctgctaccaggtaggggtggtggagatggtttagctacttgctgggctgaggtgacactaacttagtaaagagttggagcatggctgactcctttcagacaggggatgaaagatcagccctctgctcactctgccaatactatttagaaaagagaatcagagtggcacaacttccactgagcagaggacagaaaataagctccttatttggtctcatcaaaaccacccctacctacagttagacagctgcctgtttcaacaagtggagaatggaagatcagctctctgtttggtttattggaaccaccaggcaaggggaattggaacactgactgcttctgccagtgggaatagaaggttagctgcctcttggccctgtcaacaccactgtgaaagggaatcaaaaactactgcttacttctgttgggtgagagggtggggtgaaagattagctccctgatgagctcggctgctggaactatgaatgtgtgtgagtgtgtgtggggagagagtgtgtgtgtgtgtatgggtgtgcttgtgtgtgtgtgtttggtttttccattggagtttggctaaagtatgacaggtactttttgctaaaaaggttttctcttgtaggccaacattttcctgatcttctgtctaggaaaataagcctttccttggagcttattttgtctgtgcctgttggtggttctacgttagatgtttctggatattaaaacaacaacgaaaactagggaatttgccatgttgttcctcaagtcctcagattcctaattttttttcttctacctacttcgcaaagtcatcttacacttatttgttttgttatgttcagggctttttaattatagaaagagaactgggaggaataaggctgctccatctctgtcaggatcagaagtcatgtagtgttataaaaaggactttgtctaccattttaaaatagctgttggctgtaagctccttattgtatttaaagtatattggctaaaattgtgggaggtaaggaaaactctttgtaaagtgaactgacatggtgaaaagagagagaagatatgcttgtcaaatattgcgaagtctattcagatcaagctagacatggtctgtattagtcagggttctccagaagaaaagaaccaataggaggtgcatgtctgtgtgtgtatgaaaaggaatgtattagggagaatttgctcacatcattataaaggcaatgtcccacgacaggctgtcagcaagctatagaatgatagaagccactagtatgtctcccaaggaaggtgatactatgtctcagtccaagtcccaaagcttcaaaaccagggaagctgacagtgcatcccatagtctaaggctgaaagcctgagaacccccagatcccccagagaccactgctgcaagtttcagggtccaaaggctaaagaacctagagtctgatgtctaaaggcaggaggaagaaagggcattctgcactggaagagaaagagagaggcagctcacaaagcaagaaaagcctgcaagctgaatatcccccttcttctgtctgctttactgtagacacacctgcagctgattggatggtacccacctacattgagggtaggtctttctctcagtccactggcttatatgtcaatctcctctggaaacaccgcaatagatacatcaagaaacagtgctttaccagccatctaggtatccctcaatccagtcaaattaatattaaccatcacatggcctattcacaatttaaaaatgtagcataaattgcagcagtggtcaagtgtattggcaagttgtaaagtgcctataagaaacctatacacgagcatttgcagattcccttaacacttttcagcaaatattttgttacaattgaaattaaaaggcagtttgaaattgttcctctactaaatatcacactggatatgaataaaataactagatagactaacaaggtacatactttattgcctgtgattattgcaactaccactcctggtggagagccattcttctcaggtgtgcaagtggaagattaattctcaatcaggaatatagatttgatacaaggaaagcatttcacttggcattagtgtgtcaacatttcagctaatttgcctaaccacaaatacttcagggggaagagaaattgctagtgctttatattaaacattggatggagctggcggagataatacaatttgtactttttttacatagtttcaacgaattttggcagatatgtctttttgaggcaactttagatgttgaaaagctgcttgtggatattcaagacttgtctttttttcatgttacaatgaccatcaccatagtttgtatctgattttttttgtgtgaattgaggaatgtggagtcataatgcaaaagtcattgccataattctttgcagatcttatgactggaaattcttgtgtatgtagtttgatattcatttgtaacacatgtaactggttcgtgtaatgattaaaataataagtaatgcttgatcatggttaaaataaataccaaggataaattcttctattaattagtgtaagcttatcctaattaacatctttaattatgggctgttgttaatttttgtcgcaacctattagatatactgtcctaaatcattaacactagtgtaactgagcataaactctaggtgactcacggctacagtggaagcgcccatggaaaatatatatttctaagtacacagtttagataatttcaagcagaatcagaaaattcttgatgaattctaaatttagtataaacagaaatgtattaggtttggttattgagccaagcttcaaacattgaatatcagaattgtgtccatttgcaatgagtaagcatttgattcaagatttttttttgtactcagactcatttttgtatatctttctgtttaagtcatattgtatttactgcgattacagattttttacatatttcttaaactggttctatgttatgccattatataacaggtgataaggaatgtactgtcactgccccttgacaatgaaaaggggacatctctactagtgtatgtgtatgtagctgtggaggagttgaaacagtgtaagtgaaatgcctagaaattgtcctgagttttgattttgtttgtgcttacatttttattagtatatgtactttcttgaatagataattgatttggggcaatatttctcaatcttggcactactgacattttggactggataattattggttgtgcctggctttcctgtgcattgtaggatgttcagaagaatctctggtctctacccactagatgccagtagcaaacctgccacctctctgcctacttccgtcctgtcttgcaatagtcaaaaatgtctgcagacattgccaagtgtcccctaaggggcatgagccttggtggagagaaacttctttacagtctcatccttggcgatgtcatttccttataatttgcgtagttaaacatttttgttttgaggagcataagttgtgataccatacctgtacagaagaggcttggatttaaggttaaccacatttaactgagagaattttatcaaagcatgaaataagaaaaataggggcaaaaaatgaaattctaaaatggcttatgcaatttctaagggtagctaataagaattctgaattggtgacattgtttttaaaaaaagtaaagcattaaaagaatttcaaagataaaatatattttttggagtgtgaacactgtaattaaggagacccaataatgttaagttacttaaaggatgtatttttacttaaagtaggatacaagttggagaaattaacattcggttgattgttaaatattttgattcaaagaaagaacatagaattgtcagcctcaaaaaatatgcttaagatagaaaaataattttggttgcatgaaaagaaaaagattttagtaaattgttgacttgaaaaggggaactatttgacagaagtctcaacagtgttttggagtggcatagtgattggggggtgacatcagatgattagagttaaaaacgactggaccggctgggcgcggtggctcacgcctgtaatcccagcactttgggaggccgaggcggctggatcacaaggtcaggagagcgagaccatcctggctaacacggtgaaaacccgtctctactaaaaatacaaaaaattagccgggcgtggtggcgggcgcctgtagtcccagctacttgggaggctgaggcaggagaatggcgtgaacccgggaggcggagcttgcagtgagcggagatcgcgccactgcactccagcctgggcgacagagcgagactctgtctcaaaaaaaaaaaaaaaagactggaccagttattaggccttaagttgatgtaaactatatgacaaattgacaatttagagacattgtggggacatttctatgaaacgtctgtttattattcattcctgtgatgattttgaaagggcaaataaaatcataatcacatattgtataatgctttttgtctttcaaatacatatacattaaaaatgacttatataaagcaaaatgtacctttttgtgcacaattctattggtttttgtggatgtatactgttgcataaccaccatccaaccaatacacagaagagttctataacttcagaatattcctttgtgctactcttttatagtcattcccatcttcccatccccaccctctattgacccgtaaactgttttctgaataaatatctgggaaaaggattgctgtgccacatggtaggtgtatgtttaaagtttctcagaagttgacagactttttccacggtggctgtaccattttgccttctcaccagcaaaatgtcagattacagttgttttgcatcctggccagcacttggtatggccacttcatttatttatttagctcttcttctgataggtgtttagtggtatctcattatggttttaatttacacttctctaatgattgatgattttccccggtgactgatgatgattgaggatcttttcaggtgcttatttgcctcccatgtgtgtatcctctttagtgaaatgtttgttcaaatcttcccatttcaaaaaatgttggcccttttcttattatgaaatttctatggctctttatgtcttgtgcatagaagtcctctgtcaaacagatgtctgttttgcaaatattttcctgatttgtagcttgtcttctcaatattttaacagtgtcatttatagatcagaagtttccaattcttcaggtctggctcccctccataatctgtttgctttgattcacttttcagcatcctcatgtagttgctttttgtgtttggtctgagattttacttgtgattggcagggagagataggctgaacgtgactgagtggagtatagcatgagaagacttgcataatattttttttaattttcagtgttttgcaaacattatttttgatccattaataatgttaatgattgccattttatatacgagaaaataaaaaaatcaagagtcataagagtttaagttcataaataataaaaagccacatggaaataaccagtgatctaaatcacctggaacaactaaaaccttaaggtattatatcctagtttgtgtgttccgaccacaagcccctagaatgcaaattacttatgtaccttatttaattatgtttgctttacgtaattttagtactttaggaacttccttgattaaatttcaattcatacatttgctgaaaaataactaattttaaaactaagtaaggttattaagtaacttttttccatctggaggagaattgtttttgttccagattctttactgacacaatagtagcacactcgaataagtgcatagtatgcttcatggaagatcatgtgtaaaagccaggcttagtcaatgtttcttctgataatacatgtgaaaagttgaaaagaacctttatggtcattttcctagtaagcaagtcaattccttttgcttaaagcattttaacttcattaatgtaaaagacaatagatatctactatgtatacaacactttttaagagatcttgaggttacagaagatagtaaagccatggtgtctatccttaagaagctatacataataagaaagaaagaaatctcactgtgatattgagtatacatttttggaaagtaatttttgaataaaatcagatgttttaaaaaatcgtaaaaggttttgaatcaacattttcaaatatttagaaaataaatgagaaaaaagacagacccaaccaattccttccagtaattttgctctgatattaatgtaattcccttcagcttttatgtgcatattatatatgttattaaccatagtacatctttaaaacatatataattttgtctgctcacttttttttaaaaaaacagcattgtatcacagtttattttcatgtaccttcatagttcaaggtacaagggaagtaacagagattccctgagagaagacaatggatgttcctaagaaagacctagtgtgagagttcagggaactgctacactttggattttttttttttttttttttttttttgagacggagtcttgctctgtcatccaggctggagtgcagtggcacgatctcagctcactgcaagctctgcctcttggggtcatgccattctcctgcctcagcctcccgggactacaggcgcctgccaccatgcccggctaatttgttttgtatttttagtagagacagggtttcaccgtgttagtcaggatggtcgggatttcctgaccttgtgatccacctgcctcagcttcccaaagtgctgggattacaggtgtgagccaccacacctggccaggattggttttttaaaataatgtagaatgttttgtatttgtccttgcatcatgtaaagatttatccttaaaagtgcaatttgtctttggactataaactctgcgagggacaggacagtacttacatagcatgttaaaaattcaagtatcaatctacccatttaggtctattggctctttactgagtccagggttttatttacatgtatcactgaatgaatggccttaagaaggtacagatgagactactgaggcatagagagatttaacagaggcaagcagagcatcacaagcagtttggaactcaacacatgtttcttgtttgaaaatatgcacagacaaaagagggatggatagaaagttggttcaatataggattaagacctggaacaaaagcacatgggcaccagcagaatctacttgagaggtcacagcgcccaaggggaaacaaccctaggcaagtcacttaacctcactcaccttagttctcttgttggtaaaatgcagagtttatgcaaactcaatacatgtcaagaaatatctgcaaggcattgtttaaaattgaccctctggatttttttcatgcatgcctggttattatttattaagatgtactaggggcaagtctcaaatggaagaaaaaataaaaggcacatctgcaaagtgaagaagtggggttaagcgcaatgcaacagaaactcttatactaatccaggaggactttacctgtcaatcaaatctatattcattttttttaaagattaataatggtttgttaactgagtaagctggcagatggtaaagtaatgtgatgagatcttggggcatctatgaccagttgatgactgactgaccaatttcaaaagatgctatgaaggatcataaagtttagttccatgtggattttgatgatagttgcatctatatttaaagccttctgtcactggaagcactcttggtgttgtcagactgtctattggactggatgagctgcaacttctcgcaattgaatgtcaataagaccaaagcaattttggttgattcatagcaccagcttaagcatattcacttgcacagattacatttgacagatagttaccttcagctgaactctgtggttagaggcttgggcgtattcttgacagtgagcttagagttgatgtctaatgtttatttcatatcctgtttttaccttccctaatattgcatgtgtaaatctatatttaaatatattcacagctgatgttcttgtcggtccacttgttatctctggacagaatgctgtaatgattcaatttaattattttaataaaaataacttgcacccctccagttttaatttcaataaatctgacgagtaatgattaattttaaggagtcttattgatgagcaattgcaacactataatgcaggaaaatgcccaagtggtgggagcatgcttacatctatagtaaacttaaaaccttcaaaatttggtgtgtgattatgaacaccgaggaaatatatccacatttatttaccaaattattattcctgtatcttttttaagttatttaggtccatcagttatcttcaaagtttaggtttgaaactatccatttcaagaatattagccttttaagatgattataatttaaataacatattctaaaatgttttaattgaacagtagaatgcatgtaacccaaaacattataaaatttaaaaagtcacggccatttttgaatatttagattgggaaaacacttaagatgtggttttatgttcaagaagaggtgcaattatggtatggattcattcatcattatggtattgtattgtcaacttttcagttatgttcaatttttaagatgctgggtgggaaatttaagggacatatagatctaataatctgagcctaaatctcctgctctatacaaataactctgcaaagctttggaatccctttatttgactaggtgaatggcagttttgtttgcatcagcctaaacctagcttggaaatcatgattttaaagcaaacacgttttcctcacacatttccatatttcctagaatctatggttttaagatatcaaacaattcaaattatgtagttatacatttcacacaggacaaaaactcatgctgaagtaggtaaaatatttttcaaaattattttctctacatttactggcatactttctctttcttactgtcttttaaaactgacagtcagttttttttatttttctcttttactgacagctagtaaatgtactgacagttcagaagcaagatgtaaatgtaagtcactattattttgttcacctgatacctgagcattagtagaaatgcatggctatattttaaaataaaaactagattatttccaatggttctgaagggaagatgtatagaaaaactgtcctctgtaaataaaaatgtgtttgaggcaagattgcattacatttagaaatagcatactttcctcattaggatgtgattggtatttgtactgaagaaaatgggctaattatttaagtaagatgtatatttactttctgtttcattagctgtaaatctttatagcatataaatctcctttagaaattaatgggaagtatataagtgagggaaagaaagcaggttatgaagttaataaataccatgttaaaaattagtttctacttaaatataaagttcaagattaaaaattaaaaattgttttattttaattagaaaaatcttgcttagttaatttctctggaagaaatgctatataagcagttaaatgtggagaattatattctattgataaaagtatgttgggccagactgaaccaacaacatcatagaaggactgattccttacttcctttaaaaagtgatctgtcatttgtctacattataaataacagctgagttttaaaacacaaggagatttttaaaaagtggcagcatttatttatttactgcttagacagtattcacagtattttatttcatccttaagactctttttttgttttgctcccacattattgttacacatatgggaattggtaaagtgggaaaacttagcatttatagatttttatactgaagcatgcgatgataaagtagtcactttcatccaagaaccttttcctcttttcacttacactagctcttccagaaatggcccctttagtgcctttaatggttttattctccttctgtcactatttttaatattcttattcttatactgccatcatatataactttgtgaaaatttgtcatataaggttaaaattgatttgcctttaaatacagtagtttccattttctgttaactgtttgaagaacacctattgagaggcaaggaaagacctgcgggataagttacaaaaggcaagaattcctcacagaaaaagcagcaggagcttccttgtcaagagcttcagcaagtagtgtcagcagcttagaagttgctattggactgctgagtgttatgcagataaattgtggctctagcttgtcctccgatgtcattctttgatttttctctgttaacactgcatttgcatttgggtctcactgagaacaaggaccagtgcaaatgccttatggcatgtgtagaaagctgcttttatgttaaaagtgatatgttttcttgttcactgtgttcacaacaaaaattcatcttccgagtcttggaattcccttatgtatttgtaattttccttccaagtcataatattcatatacaaagagtggaaatttttctttaaaaaaacctaccaaacaacaaaaacagtaaagttagttggttactagcagcaacaactgaaaagcagcatcaccaaaacatatgcaattcatgggtttccagcaaaagaggaaatctggaaagagaagatccttaagtattgctttaaagtgagcactgaaggacagccgttaaaacaatcccaatttttagaaaaggtattattccctgacatttacttgttttattcccttctcaatctgaagacacattttggacagatgctcttgtcttacatgaacattcaattcatttgagaaaataatggttatacttaaactcgtgaagtgaaatgtatggaagtctgttgctttataactttaaatagccatgtaacttgttcatggcagaatatagtcaagtcctgggcaaggactttttttctcttctccaataatgctattcaaggggaagctagttattgtgtgacacatgcttgattctcaggaggtttggacaaaagagagggttagaaggtcaggagagcctgacgctattcaactagatatttgagtagaattcccacaccagaattttgcctcatacctaattcagacagtgtaataatgggggaagggcagagagagggagggcagatggaggtgtcctttcaggttaaatgttaaaataagggtcttcatttctgtctctggtggcacagagcattaaaaaccctgtgacacattttggaagtgttgctataaaatagattttaacgtttgaggatctataaagggtattattgagtacttaatagattctgtgtttgcctactgaaatcactacaccgccgatatatacctcattaatttgtaaagcagtttggcccaacttgagacaatgtactgtattaaagcaaagtctatatcccaaattttcatggctaataattacaaaacgttcagcatctgaagaaaattatctaaatgtgacaatattggtcttggatagtttaacttgcgtgaaatatttcacacagaaacatttgatctatattgaagagttgtttcttttttcatcagatcagctatatcacagtaaattgtggaaatagaaaatggaaactaaattgttgaaaatgcatctgatagtttgtttttattgccaaaatgtcattgtccttgaggtccatcactttgtagcttagtaaaaacagatttaggcattgcaagtgagaagtcattgactgttttccttgtaaccaatttatttatcaagttggtaagtttcagaagtatttccagtgttcagcctatttcttcacttttctattttccaaattatatcctattacttcaaagatgtataaagttcacacattctggattctttatctcttttattgttttctgcttcatacaaagtaattaaattatgttcttgaagtaattcctcctatcttacttaaaatcaccttcatgatctgtcaagagttttcaagttgttctgtgataaagttcttagagtttgagaagctaaatggtggagttggtgcttaagctcttcactgaaagctgcaagagtataaacgaagtcagaaattactattattattatttttttctcattgagacggagtctcactctgtcgcccaggctggattgcagtggcgtgatctcagctcacggcaagctccgcctcccgggttcgctccattatcctgcctcagcctcccgagtggctgggactacaggtgcccgtcaccacgccaggctaattttttgtatttttagtagagacggggtttcactgtgttagccaggatggtctcgatctcctgaccttgtgatctgcctacctcagcctcccaaagtcccaaagtgctgagattacaggcatgagacaccacacccagcatatatatatatatatatatatatagttttttggtttttgttttttgtttgtttgtttgtttgtttgtttgtttgtttttttgagacgagtctcgctctgtcgcccaggctggagtgcagtggcaggatctcggctcactgcaagctctgcctcccgggttcatgcctcagcctcccgagtagcttggactacaggcgcccgccaccacgaccagcaaattttttgtatttttagtagagatggggtttcaccgtgttagccaggatggtctcaatctcctgaccttgtgatccgcctgccttagcctcccaaagtgctgggattacaggcatgagccactgcacccggcctgaaatgactattctttttaataacttctatttattgttttgtgttattcataattgttgtgcaatttaatttatttcactagtagaacactatgtacaggactgtactgtgtggaggttttagaagtgacaaaaccagttaactaggctcttggtccaaaggaatttagtgaaagagataagacataaacactaatgactgtaacatttatggaataataaataggagctgctgaaagttgtgatttcttctcattatgatagtgcttcttggattataaaaaatttaacctagaacatgaggtttcaagaggcagagatggggagagaagaattccaggtttgggactaggatgtagaaaggcagaaaggtgaaaatattcttgtgatgatggcaaacagtgactggtcaagtttgccaagagtaggttttatgcaagagcgtagtaagatgaaaccctgaaggaattttactgtcagatgatagaaaccggaataaagctgaggatacagttcaataatcaaagggaaccaaatgaaagttttgagcaaagaagggatcttattaaaacagccttttattatttcttttaagctagaggtagcttggcattatctgtgccagctcagagtgaccttcaccccaaaattctagttggattatggagcagttaatcttacaggctctaataattctgtcaccctttgttgtcattctatatctgtgtcccttcagttatgtgtcttctcccatattctcataccattatttctctgtctttcatttctttactttcatcatccacatcaggacaatgtttttattctatagtagtttgtaaacatgtcacattctttagactttcaagctctttgtcaacagtttttcaaagtccttgccttacataaacactaattctttccctttagggacccctttcctggcccttccaagcaaagggtgctcattcatccactcctcatgcacctcattgctgggagcaagtagagatgtagggattgctttcttctttttcttttacctcatattggaaagagatgtttcctttaaagctcatgttaagttgttgtgtacctttcttcaatttttgcatcaatttttgcaaaccttgcatcaatttttgcagctgctgacaccttggataccccagccacctgcctgccagatacaatgaaaaatttcacctctgactcacagtgtttctctgcatcattatcagcttttggttaatgaccatgaagcttcactttttcacctcttgaaaacttttggctacagaatgaagttaagcgcctaggtgcttatattgtctttgagtctgttgggttccttctaggttcagtttcttcacttctagcctagcccacaaggaaaatatctttagtagtcttttaaccattttcttttatttcattttttttcattctgttgccaccagacacctattctcaaatcattcacctgactgccttcttaattcctgtgtatagattgcagaatattactgaaaaaaaacaggtgtgtggattgaggccactaaaaattaatgatttccaactagagatggacccttagtgcagccttagggtaaatttcagaggtgcagctgattcaaagggtgtgcacaatttcaggggtatattgacctactgtcttcagaaaatgtttgactagtgcagactcctaccgaaagagaatcagagtgcctattcctcaaattattgttaatataaggaattatcttttctcatttttttctaattttatgggcaaaatagtatgagtgtattcttatttcatttagcatttcttcccctacctcgtacttatcttaccttacataggcttattagccagccacatgtattttttgcttctgggtaatagctgtgtattgttctcttatttttttaaataaaggggtctgcatttttattaatgactaagaaatcttgatatatttagaaattatatgtaaaaataattttaaattttttttattctactttaagttctggggtacacatgcagaacttgcaggtttatgtcatagttataaaaaaagaaagaaagcataggcagagaaggaaaatcactctggacagaaaaaaataattggttaaaatattaaagaataaaatttgtaggtaaaaataataaattttaaaatgacagtttaaaaatttatatgtaggctgggtgtggtgccccatgccgatagtcccagcactttgggaggcctacgcaggaggatcacttgagtccaggatttcaaggccaggttgggcaacatagcaagacgtcatctctacaaaaaaaaaaaaaaagaaagaaagaaagaaagaaaaaaaattagccaggcatggtggtgcatgcctgtagtcccagctactcagaaggctaagatgggaagatcttctgagcctgggaggtcaaggctgtgagccatggtcgtgccactgcactccagcctaggcaacagagccagatcctctcgcaaaacaaacaaacaaacaaattacatgtgaaaagaattatacgtgaagataataatttcagacatacaatcctatgttaactcccatagaaaattaagggagttatcacacctttgcttttaacaattctttctcttcccacattccagttttgttgaaataagcagagcttcttatcccagcttattgtagcaaaatcattatagtaaaatgatatttttatttcaagcattacaatagcactttataacttatttaaaaatttatatgatgttaaaaggattcaatactcattgagtatcctttcataacatacatctctaatttcttaatttgaattgagctttctatttggtgagagtatttctattctgaaaaggaacatggccagtgatgtaccttctgaatctttgcgtagttgagcctgtctttctaatgcctgtacccatgaacaatgtctggatgatgatggatttttttttcttataccctttcgtttgtgagcttttaatacattgcatcgtgtttctgaagagaaatctgagacaagcttaaggattatttttcactgtgggtgacccgtttttgtgtgcctgagtgagattcttacaggtttctttctttatccttaaaatcccaggactaccagcctatagtttggtgttaattaatctttgttttcttgagaatatggtaagcttttcttagctgaatattcaggtcatatttttaatcccttaattttggtttctatcatgtctttgagtttatattttcattatttgttttcttcgggctttcatcctgtgaaatttagtgaccaatatagttttattccttttatgtccaagatacataagaagttgtatgtactctagtgtccattcgttcatcaacttattccaattaccccaaacccctatttccaagggcttttcttcttccgttcagactctttatttgggtcttttcgtggttccttgcttaacactatgcacttttcacggcacacactttccctgggaattcttactcacaaccatgactcctagtactattttcatatgcatagttataaaacctgtaatttctaaatttatattgccacagtgctatcagtgagctttcaaaattcaaattcaagtatgatttttcttagttttaagatttcttcagttggaatggagacccttaatgacttagctctgacaactgttcagcctcatgttctgtaaggtctcctctgggacctcacattctagtaacactgagctgtctagtctttaattgtatccatctttcttatgttgctacaactgcacatgttctttaccaagaatactctcccttactatttattccgcttaatcctactttttcctttcactcatttggcatcaacattttcaggaagccttttcttatctcaaaatctgagtagacatgcactcatcctttctatgaaattatcgcaatttactcaatgtgctttatttgtgtccatcactagactccagaacttttagatcaagaattttaccttatttagtgttgttcccttcagggctcggcatcatgtttgaatgtgatccattctcaataaacaaagtttgattgaatgagtgatggcatcatccagtattagaacaaagttgataggacagtttgtttagaagctcttgcaagaatacagttgacccatgaactacaaggaattgaattgcccaggtctgcttttatgtgaattttttcgagctaaacacagattgaaaatacagtacttgcaggatgtaaaatccgactatgcacagggccgactttttgtatccctgggctccgcaaggctaactgcgagacttgggtatgattagattttggttatttatgcctggatcctggaaccaatcccttgaagactgtacagatgagagatattagttgatcgaatatgtagcaggagaaaactgaaaaaggaaaagaaatttatgaagtaaattaatgagaccgctgcatttcattactactttggagattagaggaacaataaaggtgactttaaaattttgaaccaacttctttataacatggcttacaagtggtagctagaaagaggagggttggttacttttgctttgtatattgcaatacatttctgattgttccctttccacttttccccctagtattgttgattactttgtctttgtaaaaaacttcatcgtgaaaatttctttctaaaatgtaaatgtgattacctccttcctctccttaaataaacactatgctcacgattgctcacactccagagaatgaaatttccttcccttagcaacatgttcaagatccttcaaaatttgttagatggtgcctctatagcttcattgtccttctatgtactttgagttttaaccatgatatttttttgcctcccaaaatcatgtactttgtggttttcatgcaagctcttcctgtttgccttattcagttgcttctagcttgtacacttttccctctccctcttcaactccatttctttgtgtacgtatctcaatgaccaccacaaatacaacttcctctgtaaaacacactaatttcttctctccttttctcctctctgctcctatagcacttttttttcttattggctgtatgacatttattacataggcatattttattagatattaagtaggttttgcattaggtatatttttgaatgtactgaaaggcagatactttattcattcatatgtgctcagaagagcaaaatatctcttacataatgtatgtttaatataagtaaatatacaaacaaatagaaatattgagtttggtaaaagatgatattgagaaaaagtgatatgtgatagaatgaaaagctacatatattttctaaatgatgggtggacatttacaactttgctaaattatatattaaatcatctctttatcctgaaaaaattatcttttccatgattagtaagtactttacagtctcttctaggttataaagctcagtactctaattagttttagaaaaactgtgactaaactagcagtactgttttttctcccatattttgtctcacactgaagtcagtgatatttttttctgttcacagatatattcactcttagccttccctgagctctattacagcctggaaaataactggaatttcctttaaaataatacacattttcttaacttatcatattaaatgaaaaacacacaaacactggcctcctttcacattccctagaactttttgttttttctgtatttggcatttctgatgtctttaattttttgtgattctggctctgtattctggtgcctggaacagtgttgcttccaaataaataggcagtagtgatagcaatactcataaatattttaagctatttggaaaaagatattttttagaagctgtgttttgaatgaccttcccatttaactacagtgaatttcattcttagttccttcccaatatctaccctcttgcatcttcttttatgttgtttctaacgtcttttgcggtacctatcaatttactgtcatctactgttttcattaagattgctacttgtagatcattaataaaaaggtgaaataaaactaaattccttatcaattctctccttaagtcaataagtatccagttttaaatgacagtgcttgaattcaagttcatattaaatgttacttcaaataagtttgggagtttacacatacatggctctttggttcaattacatttgtcttatttattttgttttctgttcccttgtagtattctttgataaacttgtcctttaaaatatatattccaactaaactctgcttagggcctaagtggtgtagccctctggggagggtcgcaaatgtaatttgtttgattggatactcaagcttttcaattgttttcttttccttagagaaatagaacctttctagctttcaggtcaattgatgtaatggttggattcagatggaatgacactttctccccattgtaagtctctagttcctcagagaaatccttgggaaatctgttgacaacttgctgtcatccagctgttctgatggtataaatgacttagacactgattcctggtagtttaaaagtctaatggaacagtgaaattttgagatctcaagtgcatcatgaataaagcacttaagtagcacttgtatatacttcttacaatttgttaactggttttctgctttttttttttgctggagaaagagatttacagttttaatctgattagacattagcagctggttgaagatgctattactgtgaagtatggaaaagaacacaatcatgatgaaaactttttactcaaatccttagaagaagaaagcagatgaaattagattggcaaaggaaaccagcccaaattacacacaggagagaaatgtagcagaggagagtactgagttggtgctgcacgcatagagcttacagcctccatgggcaggggacatgtgggtgtgactgccagggacaggaattgcaaacagcatttggagtgacagtctgggtcagcttctcatgctctttcccatcaccaggcatcagcgagtggaaagatttgacctgattttggagcacagagtgtgggctctaaggccacaggaaggcaggtgaatgggactaggatgtagtggagtccccatggctaaaaaataagttgtattgcatacctgcctttgccccacaattatcaaatccaatctagggtgaatagaaacacatctgcagacagatccaatgtccacctacaaaaagtttcagaaaatgaaaacagatggagaaaaaaaattataaaaatataaagaattctggtaaagttgccaaaagaaatgagtcttctagtcaaatgggctttgttctattagtagatgttgagacgaatgcagtgaattgattagagctgatgttatttgtttgggtgcatacatgtgtgcctggtgaggggtgggtgagggaagaaaaaaaactcaaacaaataagaaacatattgagagaaaaataatacctagagaattaaaatagtacactataacaaagtttgtgagtgattattaaggcttgtgtgggtattcgggggctctctgaggtgtcaatatgtaaactgagatctgacagtaaagactcagctaccttatatctcttcatccctacatcttgttctaagaaaacatcagaagtcctgtgatctcagcataagttgaaaactcgtaagtagtcattcaaaggtggatttgtggagggtagaggtaaactaccttgattatatttacatagaatggaagtgatgctaatttagaaatgtccattgctgtaagtcttaggagatgtaaagtaccaatgaaagatcctgaacagtattatgtgacagaaaatgagcgttacacttttaaaaaaatattagatgttgtaactttagtcattctcacctttaccttttaagtatttcaccatttaatatcaaccttcattattgatttatttctaaagatatctggaaatagtttaggctcattaattttctttttaagagtcaaatcggcatgcaaatgtttctcccaccaagaaatttttttcctggacttcaccttctgaggcatgtccacctttgaggcaagctaagccaggctttgtgaaggcagaaccatccgaagcacacagccccaccaaatttctctccctccttccctccctcccctgttcctctctccttctctttcttttttctctttctttctctttctttctctttctttcttccttccttcctttctttctttccttctttctttctttctttctttctttctttctttctttctttctttctttctttctttctttttatttctttccttctctttctttctttttatttctttccttctctttctttctttcttttttttttctttctctttcttctctcttcccccctcccctgctctcccctgctctcccctccccttccctttctttcagctgctgcttacctggggtaacatggtttgggaagaaacatgtcagaattggagtgaataaatataaatgataaaaagacaaaatgaatattattttcaagagtaattaccagtatgaagttcttcagatgataacaaaaactattgacttattttgtctaaatcaatgccactatcttatctgtgtgattgtgaagggaggaaaggaaactgttcactgaatattctgcatttgacccgtaaatacctacttttgtattcagggatgatatattcttaccttaaattaatgactgttttctactgttcttttttggtgcaaacaaattaaatgtgtgcacttctccatgactgattgtgcaaaaactgcttagacaattactatctctctagcttttgatcagaaaggactaccttgaaacaatggccacaataatggtattattctcaattctagaatttatttaaacaaacaattcaaatcatatttcataatacagttctctgaaggagcttaaagagattcagatttttccttttgtttaacatggctcttcatttagtttttgaggcatatttttaataaattttgctcagtactgtctactggagctgaaaaaatctaagaagacacaaaatggctgaagcataggtacttacagaaaagcatgcctttcttttaagaatataaaattaatacattatttatttattatataatgggatgttctacccttgttgaagattttagcagatataactcatgcacagtgtaagtgagcattcacccctgttttgtttatatggcaggactatttctacaaattttacaaattactgtttaggatctttatgacatccattgagtgctggcatgataaatgattttctatatatctgtctacatattgagggcctgattgatggcccttctgacttggggtcagcagtgagttcacatctcttggtatactttggcttattccctggaagtataaacagaaatccaatgaccactattttcattattttccttcaggcataatctgacctaatgatatgtaactgtattactgtgatttaagagatttttaaaaaactataaacattttgaggaaaagtgaaaatggtgattttaaatttaacacatttaaatattcattttatgaaaagaatatttgaaagaatagggatttatcaggatcaatagaaggcttggagtaacctaatcattttaaattttattccttcttgtttttttctgttttcccacaacttattcactaccctctatattctcatactttgctaaatcatattaatccttcaagagttggtttagatgaagcttcattcatttgataaagattaaatgagtgtccagtagttgctagctcaccttgttctgttgtgcttcacagacaatgtgttttatttttatttttattttatttttttacaaagtgaaggtttatggcaaccttgcttcaggcaaacatgtcatatattagtgctatttttccaacagcatgtgctcgttttgtgtatgcttcacattttggcaattctcacagaaatttaaatttttttccaatcattatagctgttatggtggtctgtgatcagtgatttttgatgttattataatttcagggggtgccatgaaccacaccaatatgatatggcaaagttaaccaataaatgttgtgtgtgttatgacttctccaccgacagaatgttcttctgacttgttccttctccttgggcctccctgttccctgagacacaacaatattgaaattaaattagaccgagtaataaccctacagtggcctctcagtgttcaagtgaaaggaagagtaacatttctctcacttgaaatcaaaagctagaaatgagtaagcttagtgaggaaggcatgtagaaagttgacaggttgaaagctagtcctcttgcaccaaacagccaagttgaatgcaaaggaaaatttcttgagggaaaattaaagtgctactctaatgaccacaaaaatgataaaaactgaaacagctttattgctgatgtggagaaaatttgagtggtctggatagaagatcagaccagctacaatattctcttaaaccaaagtctaatccagacaaggccctaactattccattatgtgaaggctgagagaagtgagcaagctacaaaagaaaagttggaagctagcagagattggttcacaaggtttaaggaaagaagtagtttccataacataaaagtgcaaggttgaaagagcaagtgctgttgtagaagttgcaagttatccagaagatctagataagatcactgatgaaggtggctacactaaacaacataatttcaatgtggatgaaaaagtcttctgttggaagaagatgccacctaggactttcatagctagagaagagaaatcaatgcctagtttcaaagctccaaaaataagactgagtctcttgttaggggctaatgcagttggggactttactgcacaggtggtaggtgccctaacccccatattgttaaagggtcaatggtttatagaaataatatagaagtaagtgtgtgattctatctaatctatctatctagtagtatctgtctatattcatattccctatatatccatagtccctacagccatccactgaggggagagagtgggcctgggagtagtaacactgaaatagcacgaatctacttagcaccgaatctttgttcctaaagaccactcatctcttagaggaaccaggattccttggagaaatggctgattccagggctgtggtggggaagtacaaaatgagcctagaacatcttgtgtcataaagtaagaagatacttaaagaattattagaacatgtcaatatgatccagaatgcagctgtatggggtctatactgtccaaacctggaacaacttgagcactgaaatacatattgagagtaattaattatatcccactgagtaaaatagagactcatgagtctatatagataaaaataagcctaagcatatattgaatttttaataagcaataggatatttatacagtcttgaagtatctgctcgcaaaatgtttgctaattgcaaaggggaaaattgtatttttacagtgtggaagcctggcagatatattaatgcaaatgattaaagttaacatcattaataatggaacaaatagaaatgatgtaagacatgataagatataatatgatcactgtatcacctgaatttaatcatgaggaaaaattagacaaacccaaattgagaggcaatctacaaaataactgggcggtcctctttaacagtattaagatcagaaaagccaaggaaagattgaagaactctttttttttttgggtcggcactgcttttttattttattttattattattatactttaagttttagggtacatgtgcacaatgtgcaggcttgttacatatgtatacacgtgccatgttggtgtgctgcacccatcaactcatgatttagcattaggtatatctctcaatgctatccctcccccctccccccaccccacaaaagtccccagtgtgtgatgttccccttcctgtgtccatgcgttctcattgttcaattcccacctatgagtgagaacatgcagtgtttggttttttgtccttgcgatagtttgctgagaatgatggtttccagtttcatccacgttcctacaaaggacatgaactcatcagtttttatggctgcatagtattccatggtgtatatgtgccacattttcttaatccagtctatcggtgttggacatttgggttggttctaaatctttgctattgtgaatagggccgcaataaacatacgtgtctctttcagatcaaaagaaaacttagagtcatgacaactaaaggcaacatgtgatttggggctggaggtgttttttctataaaagactttttggggtcattgacaaaacttgaatgggctttaaagataaaatggtaatgatatacgaataactttgatgtttacatcgtgcttatgtaaaagaatgtctttttgtagcaaatacacgttgcggtattcagggggaatgggtcattaggtcaaaaatttaatctcaaatgggtcagaaaaaattctttgtactactcttgtgactttcctgtaacgttgagatagttattttttaaagtaataaaaaacagaaactactgattgagctgcattacagatagaatgggaaaagagaaaatggacagaggaagtacaaacaacttacttgaggaacacctcaatagagagaagaagagtaacagggaaatatttggtggaggagacttccaagatattttcacgttctcatctttgttcctaaccactttattcatatttatttattatattgcctcctttcattgaaagtattttatacgccatttctattacagattgtaaattccttgaagaaaaggtctgtgctttatataccccttatgtgtagtatatgtagcatcacacttagcatatcataatgtgcttgtttcatattcaaacaacaggaccattttcaaacaagtgattggattttagtgagagtatgaagagcagttttctttataaacatgggagacaaaagaggttgactcacttttaaggagaggacattgtagttataacaagtaacttctagctcattgggatgtaacatgctgaaaaagttttctaaggtattttacagctaacttgataatcttttggaaatcatctgttctccatgagtaaaatagaaaaaggcacaatgatatattgaaataattaagagtatctaatattgtgatgaagtgtgcaccaaaagctttcttaaatgtagaagtgtacatgacacctctttaagcagtatctacaaaaaaccagctggaactctccctattccttaggaattcaataaatcagactgttggcagattttccatcatgtatatgtgtaaattaatagcttttttttggcagtagagagaagagagtaatctaaatgtgtaggaagaagaggccatgagagtttcacatccagtcaagataggacaaaaaaaaatctacttgcattcctatgttaaatttttaaagatcaattaaatggagacttgtttggtggaggttgcagtatatgaagagctttaatagagatgaggggagaacagcaaatccagagaatcatacccagggcacaaatgtaatacacgtaggctttttctgtagattgcttcaagagcctggcttggcttgtctgagttactcagagaggaaaaaatgaaagtgagtgtatatgttggtttggggtgtgtgaaggtgtgggaatggagagaagtggacagagggaaaatgtgttgaaataaaacaccaggagctcatggaaaatgcaaaacagaaacaaaaccaagaaaaaatctttgaggggcatacctgtgtatgaattcatttttccatagcacctttaacatagtcaaaacaaataaaatttaagcagttattcagtcaaactagtagcaggtgcacacacacattccaaacattacaaatatttgtgggccacccacctggttaatttctgccaaagcaactatccctgaataatttcctcaagtacttattcatattgtttgtataaacgtcactcaatagagaatatttaataaactggagcatttataattatataaaaattcatgtcagtaaacaaggccactctgaaaagttatgtgaagaatcacagtatgacacattttgttagaaaacggtgccttttctttattgcttagagttgtaacatcacatagttcatgttgttgttttcattttcggggtatcaattagttgatcaatcagttagtgtttattaagcttctgtccagcaggtaaagcatgctcatcaaatttgcaaatgacataaatgttagagggatggtaaaggcactgcatgacagacatagcatccaaaaagattttgacagctcggagcaataggctgaatctaacaagatgaaatataacatagataaatataaatgcctacctttgggtccacaaagccaactgtacatgtatagcattgagtagatgtgaattagctgttgatgtaagcaggaaaaaaaagacagtattttagttaatagtcagctcaacttaatttatcagttttagctgcatgatgtcattgccaaaaatctagcctgcaattttgaattgtattaaggtgacaatcctgtaccagtttgacaggtcagaccacatctagagattgtagtatttctggagccacattttaagaagagagacactaaaaactatgtcatatttagaacatcacagaaactaaacacatttatcctgaagaagacttaggagaggaatgacatccttctttacatttatgtaagctctcacatggaaaagggattaaatttgtttggtgcagtctcaataattagaactggaacttgtgaactgaagttataaggagatacctttgggttcaatcatttataataattacatataatagtaaaagctgttcagagagaaaggcgttcccaaaatctgcagaggcagaatactagcacagtttagcctgagtgtcctcctttgcaaagtggggacaacaccattgtgaagcagcgatctgggaaggcagtgggatgatatagggaaaatgttcagcacaatgaggggcatgtagtaagtaagtggttatagtacacaggggatgtcacctttcctattgtgggaggtggtgacaccaatcctgaatcatcactgggtagaggtatagaagagatgctaaatggatggatttgacaaactgactgttacttcaaaaccctaactgactgcaacttattaattaaatttgccatttaaaactgtctctgaaaccaccagtcacgcttctatagcaccttgagtatttttttttttttttttttttttttgagacagagtctggctctgttccccaagctggagtgcagtggcgcgatctcggctcaccacaacctccgcctcccgggtttagcaactctctgcttcagcctcccgagtagcccggattacaggctcgtgccaccatacccagctaatttttgtatttttagcagggacagggtttcaccatcttggccaggctggttttgaactctttacctctttacctacctcgtgatccacttacctctgcctcccaaactgctaggaatacaggcgtgagccaccgcaccaagctattctttttttcttttttttctttttttggatagagtctcactctgtcgcccaggctggagtgcagtggcgtgatgtcggctcaccgcaacctccacctccccggttcaagtaattatcctgcctcagcctcccaagtagctgtaattacaggaatgcaccaccacaactggctaatttttttgtatttttagtagagacggagtttcgccatgttggccaggctggtctagaacttttcacctcaagtgatccgcccacctcggcctcccaaagtgctgggattacaggcacgcgccattgtgcctggccaaatttttgttttcaatcctctgtgcttatttttaattatctttaaaatggagaaaaaggtaaacctgccttaggtaactgtaaagttaaaaagaatgaatatgcataaatattttagaacaatgtctgacatactttttttttttttttttttttggcagagtctcactctgtcacccaggctgtagtgcaatggcgccatcttggctcactgcaacctctgcctcccgggttcaaaagattctcccgcctcagcctcccgagtagctgggactacaggtgtgtgccaccacacccagctaatttttgtatatatatatattttttaagtacagacggggtttcactatgttggccaggctggtctcaaactcctgacctcatgatctgcctgcctcagcctcccaaagttctaggattagaggtgtgagcctccatgcccggcccatactagctttttaatatatgttaactacttttgtaatgccaaagtaggtggcaaaggattattggagaagagaggacttgagatgtgtgttttgaaaaatactaaaaatttagttaagtgcctatatggaaatagcttgaacacatcatgagattaagtggtgtgtgatcgtcagacagtgaggagactttaccagttagattggaggtcggctgttggtgaaggttagaaataaattgggtgagatgagtgaggaaaaatctcagaaggccttaggtttaggatggtaagcaataggatgggatgtgtggggattccacgtgttcgtaggtaggggaatacaacatacatgtgatttttaaaataaacttatagagttttcaggatacattgccttactttagcttaaaaattatggatggaatagtggaatctttttatgcaaatccttctttcacttagaaatagaaatttctatttcagggcaatttctatttcagaaagtccaagacttttctcctccataaagttttctcttctgattcatattacagtggttttctttttgtttgaatttcttagcattcaaaatgatgttccttatatttgtatcatccatcatgatcttttaaggggaaatttaaatttaagatacgttgtcaaatcgcttaatgttaatctattagaaaggtgttattctgaatgcataaaatggttttgctttaaatgaggccctccaaattaataaaactgctcttcctgggaagcttctaagttggttctgggaaagcaagtcacacagagaaggtccaaaaatacgttatacaccacatatattaacaaattaagacataatttctcaaagcaactccttggaaaagataatccttcttgactgcattaagattcagtatttaagttagaaacaaccatcatcatttatagtgattcaaacactatctagcatattaaaatgtattttgttgtcatcatacatacaagctccttgagagaaaggatcatgacttaactcttgttggtgtagctcatagggccactgtgggtaccgagttgatgctttatgaattcagtttaaattagaagaatgtaggcaatgggattaccatttgtccagtaacaaattcagcacaggtattctgtctctctatttcccagcctgagtcagcagtttcttttagttctgatggccagcaggagtaaaatagcagcaaagatctggcatttcagtggcacaggtgattgtggaaaattactataatctaggtggactcgattctattttccccttgctaggtactgagatattgtgtaactttctggacttttgaattatacttctcactaatctagcatgagaatgggtggatagtgtcaagaattctacttaaaaaaaaaaaaatctagtgtactcttgtactcaaagggatgagtacaatctatcacagggacacaaatgtgaccaaaaaagtggttaaaataaaatatgaaactgaagagaatgaagatttgagcatgaccttctctgtatcttctttccaaagtgttttcggatctcttatgaaggggatttaaaggcttttctacaactgctactgcttttgtcaattcattcattcaagacacaccaataaacatgcacgagctcctcttgtcctcatagggctagagaatgagataggtgcaaagtttattttagcagaaggctttcttttcacaaatcagaaattccattgtatgtattcccttaaataactggcaaggggaccatcggaatgagctatggcaaaaatccacctcagtctttacagcttcagggtgatggggccccagatcagaattgtaaaatagtttagagaatcttggaacataaaacatggtgcagaaaaaccaaggaagatttaatcttatgtatggaaaggtggttggtagtggagggggcaatggaagagagtggcttgggatcatcattaatcattatttaagtacctataaagtgaaaatatccttctggaattcactgcaagtgacactgaattcttctactaagcaaatatgtgatgagttgataaaaaagaaggtcctgaactcttgacaacagatataatacagtgaatacagaaaatcaaaaacatgctttctatctgactcaaaataaaggtgcacttaaacttgtaaaagacaacatttttatttgaatgatatgacagaagtgtcacgggagtgttacctgctataaagaaagcctaagaattattacctttattagaccagtgacactgagctttagccatacatttctaacttctgtccctctacagagacaattttcttttcttaaataaactgtcatgctagtgttaatatattgttggctctctcatgctctgagaatactgctgatataaaacatgtatatgttagattggtaatagtatctttagtgtagctgactagaacaaatgtgtttccctcatggctgtgctaatgtgataaaggaaaattggctgttcatcagcttttggctgggtaaagacagtagagatggaaccacattcttttttatgcattaataccactgagaacttttcactagttatatttcatgtgcctgcatgttgtgcaaagatgttgtaaaacatgagataatgctacaaataacaaagtagaaaagcctgtatcttttataatgataacagtcaaacaccaaatgacagtaacaggctgtaaaaaatgggatgcaaaaaaaatgcagccctactacccaacaaagcggaatatatccaggcccttgaggacttggtatatgatttgaggtatattaaagctttgttttaaaattaaatcaaatgcaacactagatcaatggatttaagaaagaacatagtttaaatgaaagtagggtggttagaatggagaaaagccattgtgggtaacttcttgaaataatccgtattaccaagtaattattgtagtaacttcctgttttttttgttttgttgtgttttgcttgtttttttggggggggacattgaaaaagatttttaaggcaatagtacacatgattttaagatgtttgagaataaatgtttatcttcattaattattgcaagtctttttaacataaaagcattaaaagtataaccagtttcaggctcacagcaaaactgagtggaaatttcagagatctcccaaacatgctgtacccccatgtacccacagcctccccctctattaaagccctgcaccagagtggtatatttgttacaattgccggacctacactgatacatcattaccactcaaagtccatagcagaatagcatgttgaatgttttgctatcattttaattaaaatgttaacatccaacctttcctttgcatgaccttaaatctcactctttcctcccctctctcaacccctcccctttccagagccttttatttgccatttcagctccttcactaattagagtaccaattattcctttttcatttaagctaaaagcacttgaacaaaaagactatttgcagagatgaagttgatgtccaaacagctgattagtttatttagaagtgtatgcaattaaaaattttgtgcaggtatctatgggtgttttccataaaagtttgatagcattggctattctgggctccagtcgcataaacaaaaatcccatagctttttaatcatgtaatccaagagttatcaagctacaacctgtgggtcaaattggctggccacctgtttttataaataaagttttatttggacacagccatgcccatttgtttatatattgtctgtggatgcttttgcattacagcattagagttgggcagttgtgacagtaaccatttggcccataaaaccaaaccatttgacttgcagagaaaaaaacattctctagctatttacagaaaaaaaaaattgctaatccctaatatgtgcagttattaggctacttgcttgattgattagtctagaatatgattggcaactttttgttaccctacattggaaaagtatatctgaaaatcaccaaccggataccaatacccaagacagtaaattcaagaaatatttgatcctagtaacttgaattatatccacatgcaattctttgttgttatatctggttttaattatttctttcccttgtactcattttgctctatttccaaatatagccataacaaatttaatttgtatttaaagaagtaacatatcctcaaaaaccctgtaaaacatggcaaccagagctgttacatgtatgggacaaactattatgtatacctgtgaacaccctgggagatatcatcacagcacaaaatgacactatataggtttatatctagataaacacatggagatatcactgagctattaaaataatgttttcagtcttcccagctgaacaaagtaaagaagaaagaaagttacttaataaaaactgctgaaatgtgtttaatataaaataaaagtttatgcacttaaactaataatggtggtaatttcttacaggtgcatcagacaaaaatcagcttctttatcaatggcgtggagaaggatcatacacctttcaatgcaagaactctaagtggttcaattacagattttgcatctggtactgtgcaaataggacagagtttaaatggtaagtttctgacttcagaatgttatttatttcatccaattacattgttcttaaaaatgcatcaaacaaataatattttaaaatatctacgtgtattcatcttctagggctactgaacaaattaccaccaactggatggcagattaatgaaagtaaaatttattttttcacagttttggaagctggaagtcagaaattaagggttcagtggtgttggttccttctggaggctctgagggcaaatctattccatgtctctcttcgtggtagctactggcaatccttagtgttcctttacttgctgcttcctaactgcaatcttgcctcagtcttcatgtggccttctcctctgaatcttctcccctttacctctgttataaggacacttgtcattggatttagggcccactcacagtcaggaggatctcaccctgagttccttaacttaattatacttgcaaagaccctttttccaaattaaagtcatagttacaggttccagatggataatagatcttttgggatctactatataacttactacatttgggaagctttcaaatataaacttctttattctgatcagtttttaagtaatttcaatgtgtaataaactatatttcctttctgtctcttttctgaggggtttgcattttcatgtagagaattgttaaagtagaactacgaagtattagatggaacctgagaaatagtattgacatgtaattaactggactgatgtttacatttactacattaaaaatgggccatatagtttaagaagatatcatatactatatattgaataaaaccagaagttgaaataagaaattatcttgaaatatctagtacagtggtctttaaaatgcctgcatattaaaataaaaatagtattttatattattatataatatatgctcattataaaaaaatctaaacaatatggaactctgtgaaatagaaagtattttccatatttctatcttcagagatagatataatttaacttttttatactcctacagatttttagtacatttttagctagagatatagttataaatacatttttccaaaaataaaattacaatacatatgcttcctctgagccttctaaaaataaatacttctccttcaaatgttataaacaacgtttcatgtcaatgtatcttctcatttagatatatgttctcatttaaaatggctgtattctatgcaattgtatagttgcaatccatgagatttcttaagctcctataatgaacatttaggtttttttaatgtttcagtgcaattagcagttattttatggaaaatattatatatatatccacatatatttatatatctgtgtctatatctacatttccatttatatatatcaaccatcaatctatcaatcatatacatagatgtatacatacgtacatatgtatttgagcagttgcctgattgcacagttccttaatatcctatttggtgccaacctgcgtgaattcatatcccatttcctcacttactagctatatggcctggcaagatattttaatatctctaaagtgtagtcaccccaactttaaaatgatgatgatgatgatcataatattgatttcccatagggccaatgtaaggatcaaatgaagcaatgtcatgtaaaacattactgtgtttcaagcacctggcatgtattagatattcaatatttatttgttaaatgaatgaatggatgaagtgctaagcacaatgcctgtatataaactatattttctctttcttgggcatggggctggattttaatgtacagcattgttaaagtaggactgtacagtattagatgaaaactgagaaataatattaacatataattaactggactatgtggtttatattttcgcacactaaaaattggccatgtagtttaagaagataacatatatgctatatattgaaaaaaattactaaactatatcagtaaataataataatattattattttattattatttttttttgacagggagtttcgctcttgtcgcccaggctggagtgcagtggtgcaatctcggctctctgcaacctctgtctcctgggttcaagtgattctcctgcctcagcctcctgagtagctgggattacagatgtgcaccaccacgcctaacttttgtatttttagtagagatggggtttcaccatgttggccaggctggtctcgaactcctggcctcaggtgatccacccaccttggcctctcaaagtgctgggattacaggcgtgagccaccgcaccctgccgtaaataatactattattaatgttattataattatttccaaaaaataaattcatagaagttgaatggctgggttgaagtatatggtcattttatattttaatacatattacagagattgctctaatgcataacaatgggctacctccagaaaggttgtgaaaatttataacctcattaaaatatatagccaagtacttgtttccttaaacactaactatccttacaaattatccacttttttttcacccttgacattcctctaagtgaaaaatattgttgaatgctgactcagaattatttggccattaatgagtttgagtagctttttacgtatgtcttgatcatttgcatttcatttatgaattccttattcatacaatgtgtccatatttatactctataattccttatttatttataaaaactcatttatgttaagaatattatgttgtataagttttcttcagttttttgatggcttatgaactttgtggtctagatattttaaagtaatcctttaatatttaagcaaaataaaacatgtatgcaagatagtgcataaatataaaaggtatagcttgatgagtttttaatatttatatacacctgtgtaactctcatttaaaaaaagtcgtagaatatttccagaatctcagagtcccctaatgaacatccactgtaaagataaaaacagaatagcatcaatgtagccctctataaccatagattaatgttgcctgttctcaaactatcatacaaataaaatcatgaagtaggtactcttttgtgttctttttgcttagcactatgccaatgagatttttccatagtgtatgcagttatatctttagctttagcaaataattctgtaaagttttccaaagtgggtgtcccaacaagcaacatttgaggatttcagttgttccacatccttatcaactgttagttttgccagatgttatcattctttgccattcttgtagccatgtagtgcatttcctgatcattagtgatactgagatcttttcatgtgcttatttgccaaatgaatatgcttttttgggaagccttttgccaagttttaattggacagtttgtatttttcttaataatttataggaggtcttccatattttgaatatgagttctttgacaaatacatgatagcaaatatggtcttctgggctaaggcttacagtcacattctcttgatggtatttgtcgataagcagatcttcttaattttaatgagtctaatttagtcattgttttatacttaatactttttgtgttctgtttagactatttttgcaaaccctgatatcacgaagatatcctcctacagtttattcaggaagctttattattttacttttcaaattttggtctatgttctatctggaatagattttttgaggttatataaggtaggggtcaaaatttttgtcccacctgaatgtgtaattaacctagaaaaccttgcctcttgaaacaaatcaatgtttctaccattctgcagtggtaacgttgtcgtgaatcaggtctctgtatatgtgaagatgggtttctttctgaactttctattctgccccagtgatctgtctgtctgtctatacttgggccaaaatatttagttttaattactgtaacttcatacatgtcttcatatctagtagttctccaactttttttcttttaagattgccttggctattatatatgaattttagaaacagtttttcaattttcataaaaaattctgttgagatttaaattactcatttgtatttaggagaatgggcatctgaacaatatcaagtatccagcccataaatgtaatatattccttgatttctcccagcaatgtttttagttgtctgtatagaggtctcactcctatttgttagacttgttcaaacatattcattggttttccttcttaatagactatttttttagagcaattttagagtcacagaaaaattgagtggaaagtatagagagttccagtatactctctgctcctacacacgcacagccttccccattgtcaatatccctcaccagagcggtatatggtatatttgttacaattgatgaacctacattgacacatcattatcacccacagtccatagtttacattaaagttcactcttggtgttgtacaacgacaagtatccactactccagtatcctacagagtagcttcactccctaaaaatcttctatgttcctcatattcatccttatctctatcctaacccctagcaatcactgatcttttcactgtctctgtattttcaccttttctagaatatcatatagttgggataaaaaaatcatgtatcctcagattggcttgtttcactgagtaatatgcatgtaagatttctccatgtctttcatggcttggtggttcatatcttcttagtactaaataatattccatggttagatatagcatagttgatttattcattcacctactgaaggacatcttggttgcttccaagttttggcaattatgagtaaagttgctataaacatcagtgtgtaggtttttgtgtgaacataagttttcaacttataaataccaaagagcgcaattactggatcgtatggtaagatatgtttagttttgtaagaaactgtaaaattgtcttccaaaatgactatatcgttttacattcctatcagcaatgaaagagagtccctgttgccccacatcctcaccagcatttggtattgtcagtgttctggctttttggcctgttggttttcatgcaattatacttagtattgtttttgaacttcatttgctaattttgttactattgcattaaaatctaatcagtttttatatttacctatgtttagtgaccttgccaaactcattattatgataggtacacaatcctatcatttgcacatatcaggaactcaactctttttgaatgtttgtaataaatgtatataatggacatgccataaatatctcctgtagatatttttgtctgatgcacttattaattctgaaataatataaaatgttattttgtttttctgtatgacctgagttattagaccaatgtctagttttaaaaaagaaggtatatatttttgatattcaaaacactgtggttaaattgccaagctctggtttaaatataacccaggtgtgcttctttgatcaaaatattaactctctttaagtctggtttctaatctattaaatggtggtttaatatataattcataggaatcttataagaattatgtgagatgatgtatgtttagaatataagttgcttgttgtatagtaaatgtgcattaagtggtaactatttttaaactctttgaacatcaattttcttattgtgaaacaataagatagggataacactatatttccatatgattgttgtaccaatcaaaagagaaaatatgaagaccgtattactttagtttgtgtatgctcttagatcaagctaaactcatgtgaagaagcaatattttaaggaacttatatatttaggaacttggtttgagtaattagtataatgcataatcttataaaatactctgcgtgaagaatttttaaataacacattaaatcttgtgagccttatttcaatatttaatccccattagtacttctaaaagtgttttattgcaccaaatgttgctcaaagtatttgatagcgccataaattagtcccctatgcactgcagggttaaaatggcttgcttctattctacttcagtatactaaatgttggattaatgcttcaaaagaacagtgtgaactgaagatgatatttttaaactgtgtagaaataaatttcactcctgattagaaaacatgtaacaggaaaccggtttatttcaaatattatttagttttcattacaactttctcctttatgttcttgacatctgagagctacagaaggaaaaggatattttaaataatttttatctttattctatcaatttatatgtacagtcgtacctactgtatcttttctctaattagagatggcgtatagactggctcattacttctgcctaatgagccaggctccatgccacctctctaatcagaaaagagataggtacagaatgttcctatggacttattataaatcattttctttctcttacttgctcctttttttaatcaaaaaattaagtcactgtcctccatacttttgtccatatccaagatggtttctttcaaaagaggtaattgtgcaagcgattactgagctgaattaaaggtgctctcatgcagtgccaggccggctgtctctgctttggaacagacactgcctcaaacacaagcacatcaaatgaaggcctatagcagatcaagatggatcttttctgtctttctctgattaggtttgacttggttctctgtttctgcacccagaaagtaacaaccttccatatgagtgttggctactacagagctttttctttgagtcttatctctagcataactctctagaaaaatgtgttgccagtgacactttctgttactgcaggacttgtctttgctttccctggaaaagtaatcaatggaccaaatgcatgctttttactgaaccctcatttatccttattaatggtataatctgatttgatcaggctgaattttatgtatacaaatagaaacaccttagaccatctatatcaaccaaagtgtgatggctcctttttagaacattttcttttagttgtagatttattttagtgcttccaattgggtatataacctggagcacttgtgttagcagatatgtagttatgaggagtcagcaatgtcatcgtggtaataaaccatactagctctccaaattttggatttaaaattacagaactacatgaatcaaaacttttcccagttatttctgaacttgtttatcaacagagttctagttgccgattaaaggtgagaatttctacattatacattcaaatgtgcatagcactttcttaagaagatcattggtcattaaggaatcaataaatatttgttgagtgtctgttaaagtgaatatgcagggaagaaaaggatcatcgtctaaagctaactcctacttgccttcctttctgtgttttcaacgttgtgtgtcttagcccatatgcttgtacttgattctaaagttggaatgctacttctaatttctaccagtttcccatgggttcacatttctaacctctgctagatacacaaactccattttagttcagctgaaatcatgctaatttttttcagagagaattatttttgggaattagatttaaaaaaagcttagaaagtattgaaattgactaagagattggaatggaagaagagtataggaatatagtatatagataggagtttacttagtttcagaacattgcagacaaggtatctagcaatattatcagacaagttatgttgtatatttaaaatgatgttaatgtagctctctcaaccatactaagtaaaaactgctgattaattaaaatttgaatgcaaaatatgcaatcataaggtagtagaggaaaatgaaggcaagtgtttctataattctagcatattaaggacctttattagcacgataccatgtccagaaacactaaaggaaaatattgaaacatctgactattaaactgggaatttaaaattcaaacaacgattatcattttgtacttgatagtttggcaaggactagaaaagcgattataccggtgttggaaatagtttggggtaacctggcaaactatcaaaagtaaaaatgcgaaaactacttaatccaagatttctacttccaggacactatctcgagaatataattagacaaagacttaaatacatactcaaaatgttcattgtagaatgatttaaagtaacaaataactggaatcagttaaaaacttcaaaaaggaattgatttaataaattataattcatgcctactgtggaatagtatacaccatcaagaggaatgaaatatgtctctttctatgtacatggcaatgggttcatgatgtgttattacatgaaacaaacaagattgtatagtacaaaattctataaatttaatgtatatgttataaacatacatatacatattaaagttctggaaggaaatatgccaaaatgttcttcagaatgttagtaatgttaatctctatgagtgggattgcaaataattgctttttaaatttctttttgtgcaatttttttcagtaaactataattttataataagaattaaaaatattttccaattttggacaaaataataaatggaagcattttcagaatagatttattctatgaatgtaacaagttcagccagagacacctaatttgtatagtacagagggtggtcttgaaaatgttagtcatttaaattctgtacttgtcacatggattcaggaaacacaagcgttcattggacatttaactcattgtacatacaattattattactataataatttgtgcctgagaagcaaagcatgagatttagaatcagacagatttgggtttgaatgctagttctgcttcttaacagccaagtgactttggcaaagaatataacttctcaatccaatttcctaatatgttttctcatttataaaatgtgttttatacacatacttttcagggtgatcagagagcttataaataacacatgtttgattcatgttaggtattcaataaaatttcgctatcataaatattattgttaatttagttattaagtttattgactgtgatacttaaaattttaacataatggccatgaccatatttaattttttttggctgaaaatcaaaatttacttagggtgagggagaaaaaaagtccagtttagattcattatgtagcagatattttaaaattctgtgttttgtctatgtaaaccccacaaaataatttctctctctttttaaagatctgtcctttctagtgttcttcaatgtttcctgttcatcctcacttccacctgatgctatttcttcttaatccgaagaacctcccttttcattgcttgtagctcagcctgctgaagcaaattctctcagcttgtgtaaaaatgtctttacttttgcaggatattttcatttgatatagaattctacattgattactgttacttcttttagaactttaaagatgttgtttccttgtcttcttgccttcattgtttctggtgagatatcagccactatttatataaatgttttcttgtatactatatgtttctttccttctttctttctttctttctttctttctttctttctttctttctttctttctttctttctttctttctttttgaagcagagtctttcactctgtcaacccaggctggagtgcagtggtgcgatcttggctcactgcaacatctgcctcctgggttcaagtaattctcatgcctcagcctcccgagtagctgagattacaggtgtatgccaccatgccaatttttgtattttcagtagagaccgtgtttcaccatgttggccaggctggtctcgaactcctgacctcagatgatccaccctcctcagcctcccaaagtgctgggattacaagtgtgagccaccatgcctggcctatatattgttttccacttgatgctgttaagattttatttttatctttcatgttatcagtttatgatatgcctaggaatgattttcattatatttgtcctgcttgaggtttgcttaaattcttggatatgtacgttggtgttttcattacatttggaagttctgatagttgtatcttcaaacttttctttctttttttcctttttttgcttccttttctttcttctgtaataagactctagttagattgatgttagagcactagatattgtcccatagatattgggtacagttttgtttgttcctttgttttcattttccccactcttttttgtgtttcagtttggatactttctatttgacttgtctttatttcactggtcaatttctcttttgtgtctaggctgctgctaagcccatctagcaaactgttgatttctaaattatacttttcatttcaagtattttcatttggccgttttgtagacttcatctattggctcaaattcacccatctatttgcatgtattattcactatcacccctagatcttttagcatttatattataggtattttcaaatccctatttgataattccaacatctgggccatgtctgcatctccttctattgactctttcctctctttacaaagggccacattgtgttgatttctcatgtgtcttaaatatttttattgtatgataaacactttgcgtaaaagaatgaaagaggtggaagtaaatcatattttttggcgtttttccctttacaaagaagagcactgctggttctatgagaccttttgaatgggggtgggcagtaggaaagaaaaaataccaaactgacttgaagttgatctgtacgtgggctttactacagttttaatattatttagctcactactggtttcagatatctgtggatagaattgaaaatagttagacacatgtctggtggggcctccttagaattctaatatgtcattctggcctctgtatggctgcttctttcttactccttctatgcctgaatcctctatttcttacctctgagctaagtatgggagtagccctgggtctcgtccaatgagttacatgtccagtaaatgtttgtgtttcctacaaaaggcttattactttctagaatttaattcatttagttttttctgtgcgctctacattttgattggttaaaaaataatgactttagggcttatctggcttgttttggttgttagattgacagcaaagtgatggtcccttacaactttttacatttaaagcagatgttgaactattataacaacatctaatttatacccctttttttctttggcacaactctgtctatacttaactctccaaccctctagattgtttcagctatggctggtcactgactctgaacaaaaaaggtgcatattacttggccccaaagattattttggtagaattcaggcatcgacgttttaattacctcctctaatttttcatggggattttcagcttttgtgggccctaatttatccctgactcttaacttttatatctgtttctttggtttgcctgaaatctgtttactgctaatatttaaaactgaaacatgtttttttataaatctagccattggatcttgtttcactaatgatcatgtggcatcgtttaatctcggtgcccccagcggctctgtttgttcagtttgtatagcacatgcatctcttgtgtttctttttctgtcagatacataatcatattgattagtgtataccccttataccctgagtccaaaaattcctcatccctcccgggatcttcaaatgatttaacgactttccactatctctcactttttgatgtggtctgttccctccttactcaacttaagtttcatggccagttattataaccacttcttttcatggaactggacttccctgccgttttttcttcacttctactatgatcttggcactaccacagcataggttaaatatacccaaagaggacgactcttcccaccttaaactcatgaccatgaacttcctatgtttcctgatgctgccctgtgatcattccatatttccctcattcattcactttcctgtcttatgccaactatttatacattttcctttctcattatcctgatcctcagtgattatattacctccaactttaccataaaaattaacaaaaagaataaaagagcttctatagatttccactgctatatttatccaccactggcataccacctattaatagatctgaccaagaatatcttgcctcatttttccccaatttactgctgtattgtaaaattttcttgtattaatggaacattttcaagggaataaaggcatgttgttatttttccatgaaaaattattcttgaccctcccccatttcttctactagccattgtcttatttatttgctctccttttagcaaaacttcaccaaagtatattcaaccataggagcctttaattcctcttttcaaattccaccatctacagtcagactttagctcaccactgcacttaagctacacttgtcaaatctctactcaccttcacattataaatctaatagttaatttcaagtctttatctttttgacctattaacatcatttaatggagttgatcgctccttcctccttggtatacgttcttcacttggcatctaacactccatcatctctctgagtttctagttgctgcgtctcagtttgatttactggttcctcttcatctacttgacctcttagtattggtaccccaagccttaagacttagctctgctcccgtgtctacagacactcactcccttaaagatcacctccagtcttatagctttaaatgtcatctaagtgacttgacctccaaatataaatctccccaccccagcctctttcctgaactccagacgactctgttacatgtatcaaactacccaaagtctccatttgaatgtttaatttacatttcaaaattaaacttactttttttcaaaatggaactggttttcttaagctctctcactttgatccatatactacttcttccatggtcttcctcatcacaagtgaaggcaatttcatttttccactaagacagagaaaaagatttggagtcatccttgtcaattctctttatctcatgttcaacatttttttttttgttttgcaaaatcttgttggtgttagaatcaaaatatatccagattttgaatccttcttagcacttccactagaatcatcccagtccaattcatggttgctgctttgccgggattactgcattgtcttttaactacttccaggcactccgctttattctcaacacagcagccataattgttctgttaaatatcagtcaagcatattacttctctgctcaaaatgctctattgtttctccattttaccagagtgaaaaccaccattcttactataacctacaagacctaactgagctaacagcagttacttctctggctttatttcttacatttgtttattttgttctccttgttttacacaaattggcctctttgccgatttttgactatgggaggtgcacttctgccttgataccattcgctgttctttcaacctggaacttttcacctcctgatatccatcaggctgactcccttacctgattaggtctgctcaataccagtttcttaaatacatctttcttatcaccccgtttacatctgcaaacaccacctccccactttgggtctcattatgttgctctattcttttccatagcacttagcatctttaatgtattatagaattgacttatttttgttgaatatatctgtttttccctctataatataaaagagaaagcaagattttttttatttgcattactcactgatataccccaggatccagaagattgcctatcacatggtagctactcaatacatattttccaagtaaatgaatcgatgggcagcttccatgcagcattaagcctgtgggtgtgtggaatgcaagaattgaagcttgggagcctctgcctagatttcagaggatgtacagaaaagcctgggtgtccaggcagtggcctgctgcaggggcataaccctcatggccctagaacctctattagggcagcgaaaaggggaaatgtggtgttgcagtctccactgagtcccctctaggacattgccttgtggaactgtgagaagagggccaccatactccagaacccagaatggtagccactggcagctttcaccctcagcaaggaaaaactgcaggcactcagtgccagcatatgagagcagccactggagctaagccctgcaaagtcagaggggtagagcttcccaaggccttgggagctcactcctcccaccaatgtgccctggatatgagacgtggagtcaaaggagattattttggagcactaaaatttgatgactgcccttttgggtttcagacttgcatgggggctgtagcctcttttgtttggctgatttatcccgtttggaatggaaatatttactcaatgcttgtatctgaattatactttggaggtaaataactgggttttgattttacaggctcataggtagaagggaattgccttgtctcagatgagactttggactttggagttaatgctggaatgagttaagactttgggagactgttgggaagggataattgtattttgcaacatgaaaatgacatgaaatttgggaggggccagaggcagaatgacatggtttggatctgtgtccccatgcatgttcagttgtaatccccagggtggaggtgatacctggtgggagatgattggattctggaggtggatttttcatgaatgatttattgtgatagtgaatgagttatcacaagatctggttattttaaagtgtgtggcacctcctcccactttgctcctgctttccacatgtgatgtacctgcttctccttcaccttctgccattattgtgggcttcctgaggcctctccagaagccaaacagatattagcactatccttcctgtaaagcatgcagaactatgagtcaactaaccctcttttctttctaaattacccagcctcaggtatttctttatagcaaagcaagaatagactaatacattatcctttgttactgatgtctaaaaatcttttttaaaaaaattaaaagcaagtatattaagacagtaaaggaataaaaaatggctactccataggcagagcagccccaaggactgctggttgcccatttttatggttttttcttgattatatgctgaataaggggtgggttgtttgttagttttccctgaaaggggtgggcaattcccagaattgaggatccctccctgttttaggccatatacggtaacttcctgatgttgacatggcatttgtaaactgtcatggtactgatgggagagtatcagtgaggacaaccagaggtcactcttattgccgtattggttttcgtgggttttagctggcttctttactgcaatctgttttatcagcaaggtctttatgacctgtgtcttgagccaacctcctatctcatcctgtgacttaggatgacttaccctcttgagaatgcagcccagtaggcctcagccttattttacggagcccctattcaagatggagttgctctggttcaaaagcccctgacaattaccccctcctttttaaaagaaagctcttaatcttaagagttgtagagggatgaagatccatcttctctaacttcttcaagctgaataggggtgatgatattcctgcctaacaattagggtctcttgtctttgggatagagaggaactcaatcagaaaatgctggtatgtcaaggtccattcagaatacttgagttctgacaaaagttgatacctggaagattaataagtatttaatttaagaaaacattcggtaagcttatcctacacaaagagtataacagcaatacattccgcagcagtaaagcaaaataaataaaattatcacaactaaactaaattagaagactttccatgaactgggcaattgttagaaccaagctaatatgtggttgctagtaaatcccagtatgtgcccagaattagaatattgatccagattttgacattgcccattcattttggttttttttgaatagtagtcagagatcacttggtggtacacagaaataagcagagtctgtctaaattacagaaaaaaaaccttaaacacaactaatgagactagaatctaataacaggtgtaccatagtttttgaagcaattctttttcttttcagtctctcatttttactaaagacaaattataatagaatcgatttgtgcgcaaaaatgagctttagtcttatacttggcctgattacttgtataaaatgctaaaaaataactatttttcacataggattttaaaattggctttgatggaactttgttccataaaaaggaatctcagataagacctttttaaagctgagcccagccctgggtttgtacaatcaaatacctatgagttgggttaattcctttactcttgaggtcctaagatatcttcgggcccctgagtctatcagaaagtgacattctttacttatcacaggtcaggaaccctgtacagggcatgtgtaaacaaagaatgtgaccagttttcccaaggggtttttattggctttataagtcaagattgattccttaaaggaaagcacaccattccagtgaaagtcttggtaaaataacaaatttttccaattgtgtcctgttacaaaataaaacagatgcttattgcacttatgcaaatatctattgtcataagttaagaatactcacaaatagtttctaaattctgaagaaattaggtagaatcaaatatgccccaaattttgtttacaggagtaaaatttactcaattgttaaaaagctgtaaatagcttaaaagaaaagttgccttggctctgatagcaaaacaaaggatcagcaacattttaagcaaaaagttttaaaagattacttcagctatctattattcagcccatgcagttaactcttgttcagcttgatattcatgaacatttcagctctccatcagtactgaaagttttatcctctcttctaatgtcacaatcttcaaagttattagaaacgtgcattcaagagcacctgtcaaaatcctatagctgactctaaacttactttttaaagaggattaaaacaggtcaacaattttctatggatgacaaaaagttttagaacgacatatattaaagccacaattgataaagaaattttggttagttctgtgacatacaatgattttactgacaattataactattactgataatgtacactaagtcatatcagaattacaggactttcccataattttggaacacaaaccaataacatatttttacaaatacagtccaaagaaagcaaagaccatttcatatttttctatgcttcctgtatgatatttataccaaataacctgaatatgccattttggactttaggccacctaatagctaagagattaattaggtcagaagaagacatactttgtaattttattttggaaagcttgtcaaatattaaaggtttaaaacactggatatcacaaaatataattccaggtcatcataagtcattcattaggccaaaataataactcaaaaatatttaaaggggaaaaacctttactcattaatagagggaagacttagatctccaaaccatctgtctcttttctttcctttcctatataaaatttcttttttagaaacaacctctttgcatagttgggaatatggctaattccacatgtccccaggccttatctagaatctaaagtctccaaagtaggtaaattgaacaattttcaaaagtcaaagaagcagtttctgaccttaaagcatttagtaaacttaatatgtgacctgcctaatttagaccaaatgtctttattttatcaataatttttaaagctgtttttatttcccaaacattcctaaagtcacatgaactaaaagtgattacactttttacttttctgacaaaatatttgatttagacacttattatttttaaaccgattaatcaaagctcttttatatcacatatgcagcacatataaatacacagacagaaaaagatccagtaagatttttcatttttcggtttcttaactggattactggcttcagggtggagccttagaggaacagagccaagaatgcgtgaaatttctaaagcctaataagcaggcacagctggaaggcaaactagatcttcaggaattaagggttccattttaatagcagattctggatcccaaaaagagggaattagcccatctcccatgggagtcttacctctcagtggggagtgggggcatttccataacttctaagtgaccaagagcatgcttctctgatccaaatgtgcaaagagccaagtattccataactgccattagccattctcaaaagtgtatttcctacctagttattgcataccaaagctctttcctaatgtaaagtgatttctgatacccccaaaagtaaaaaacatcagataacgcaatgcgaaacacaagacagccttagattttgagagggatctatccatttccaattcctgggatttcatgaggaaaacagatgttttttctcaaaatggggtctgtggtgctcctttttttcccaaggagtcccaggctgttagaacttaaatatctgcttttaattaagctgacttttaatggtactgctgtttttaaaaagtcctcttaaatttcttattacctgactttagccaggcgaaactgtcaataattctggcttttgaactttatcaaaggtaacctcccaggtgttcagagaaaggaaaattcaagacagaccattgaggggaagagaatcaacaaatgttcatgcgcatatcaaaccagaaaggactcattccctaagctgggaattgaaccctgaacctgggtcaccattgtgaaaagaaagcctcagctactgagctactcactgggcagtttccattgctcttcccagaaggagtctagagcagcagattttgagcttgcaaaggttttaaatgctcaagataattttgtagagctaactatgacatgaacccccaaattcctgttttctggatggtagagacctagagaaagtaccgccatgtggtcacaaggtcaagctcccaaggacataactagccagtttgctgggccgtcttgaacagtaggcttatggggtcctaagcttgtgttctatcctaaggtacccctctttctaacagaaatatacaggaagacaaattcacagtgcaaagtacaacagattcactgtagcttaaaactagcctcacaaatcctttttcacattaatcagaactttacagaggagataaacagtgatttttaccattctttgaactagtttgcacagagagaaagagagaggacagaagtctcactggtaagaaattcttacccttttgctggcatgccaggcttctgggttccctttccctgagcagtcctagtgacccagcttgacgcatcatagccctgggggccaagctgcaacacaaaggaaaattgtctttttttctgtcctggccagagcaaaatatgtgtgacatagacattagccactctgctcagcatccaatatcaaactaacaaggctcaaatttgcccctggttggaccctgtcatcattaatccaacctctgaccagaagtttcaacatgtggtctctgggcaagatggtcaccctgagtaagagaaaaggtaagaaagggaaaggagagaaagaaagaaaagcattggctgcatacagcagggtggggaaggcaaaataatcaaggataccagagaaagaccctcccattgcgcaaaagttcaggctgccgcttgaagggatctgtcatgaagggatcttttccagtagtcccattagctctcaaacatcccccttttgggaggaaaaagctccccaagtcccacattcacatgcatgcctaattatgtcacccacagccatcagcaaagagggcaaggcagattaacccaacgagaatagcagttaatatctcgtattgccaaacccattattagctgagagggactttactgagaggggcctgaaaccccctaaatcttaggaaggactctaaccttcttaagttgggccttgaatccatgttctgtcaagtgtccttgtcttttattaagaggggcctttaaccacctctgtcttaagagagactctaacgcccctaaattaggcctctaacccatttccatcctttacccaagcaaatgtaccccacttacccagagtcagccaataagtgctgaagtctatttcctttgggtcaggggagtctcctccgtgttgtcccttccatggttcaccagaaagatgttaccagaaagaggtccagatccagaccccaagagatacattaaaacaaagcaagttttccttttgaacttgtcaaaaattccatcttgtaaaggatattaaatgttgctttaagctgaaccttgagcaaattaggtggtttgtgtgaccatacatgtatgtggtggcttcttgtttgcaacttcaaggaacaagtattaatagttcagtgtatgatgttgatttgagttgagcatttgcagtttggataatcttaaattttgacagacactagctgtggagactctttctgttactaaatccttttgttttgaagctattgccattcgtctttctcttgtcctttatattttttgtctgtttctttaagcttttattggaaatgtgcataagtaaagaattacttgtgttacttgccaagcaatgcacatttcatagttttaaatctgtaatcagcaataaaaatcctaaaatatgtatctaagaacatcttaaaaaattctttctcactcaagaaagaattcaaggtgagtccatagagtaaagtgaaaccaagtttattaagaaagtaaaggaataaagaatggctactccgtgtagagcagcacccccaatgtctaaaaatcttaacaatgataataaaagcagaaaacatatggtaattttttggcataaaacccttactgcagtgagcattaaaaacaaataaactgctttggttcttcattctagagacatcatatttaaaaacttagatttcattatttgattttcattttgttacaaaataaaatattcttagtgtcacactaaacagagatcagataattaacctgaccccatgatgcataattttaattttaatttcaatttgagttcttaatagaaataatgaaaggctgttatcatattttggttgaatggacacagatctatttttttatggtaccacattgagaatttgtttttttacatatataaatctattaatggtattgtcaaaatactgtcttttttttttttttttaagatgtagtattgctttgtcgcccaggctggagtgcagtggcatgatcgtatcctagtgcagtctcaagtaatcctcctgtcatagcctactgcatagctgggagtacaggtgcacaccaccatgcctggctaatttttttttttttttttttgtagagatggttcttactatgttgtccagtccagtttgaagcaatcctcctacctcagccacccaaagcataggcatgaaccatcaagcccagctagtcttttaagctttgttgttttgaaaataatgaggattattactttgatatcatattagaattttttctaaaaatttaacaagaaattatctttagttctgtataatctgtgggcagctatatctatttataagcatctatgccaattattactttacttctagttgtaatttaaatttgttttagttttcaaggacacagctagtcttaataacttgatttgtttttatttccatttattgagtttagcatttataataacttaaaaaaaattttatttcactttaagttctgggatacttgtgcataacgtgaaagtttgttacataggtatatgcgtgccatggtgatttgctgcacctatcaacctgtcatctaggttttaagccccacatgccttaactgtttgtcctgatgctctctctcccctccccacacctgaaaggccctggtgtgtattgttcccctcccttcgtccatgtgttctcattgttcagctcccatttatgagtgagaacatgtggtgtttggttttctgtttctgtgttagtttgctaaggatgatggcttccagcttcatcagagtttctgcaaaagacatgatcttattcctttttatggctgcatagttttccttggtgtatatataccacattctctttatccagtctatcattgatgagaatttgggttggttccatgtctttgctattgtaaatagtgctgcagtaaacatatgtgtgcatgtgtctttctagtagaataatttatattcctttgggtatatgcccattaatgggattgctgggtcaaatagtatttctggttctgggtctttggggaatcaccacactgttttccataatggttcaactaatttacattcccaccaacagtgtaaaagtgttcctgtttctccacagtctcactagcgtgttgtttcttgactttttaataattgccactctgactgaaatgagatagtatctcatggttttgatttgcatttctctaatgatcagtgatgttaagctttttaaaaatgtttgttgactgcattaatgtcttcttttgagaagtgtctgttcatatcctttgcccactttttgatggggttgttttcttcttgtacatttgtttaagttccttgcagattctggatattagacctttgtcaggtggatgggttgcgaaaattttctcccattctgtaggttgcctactcaccctgatgatagtttcttctgttgtacaaaagctctttagtttaattagatcccatttggcaatttttgcttttgttgcaattgcttttggcatttttgacatgaaatctttgcctatgcctatgtcctgaatggtatcgcctaggttttcttctagggttttaatgattttgggttttgcaattaagtctttaatccatcttgagtcaatttttgtgtaaggtgtaaggaaaggttccagtttcagtattctgcataaggctagccagttttcccagcaccatttataaaatagggaatcttttccccattgcttgtttttgtacagcttgtcaaagatcagatggttgtagaagtgtggtgttatttctgaggtctctgacctgttccattggtctatatgtctgttttggtaccagtaccatgctgttttggttactgtagacttgtagtatagtttgaagacaggtagcatgatgcctccagctacgttctttttgcttaggattgtcttggctatatggactctttgttatttccatatgaaatttaaattagttttttctaattctgtgaagaaagtcaatggtagtttgatgggaataggactgaatctataaattactttgcgtggtgtggccattttcatgttattgattcttcctatccatgacgatggaatgtttttccatttgtttatttcttctcttatttccttgagcagtggtttgtagttctccttgaggagctccttcacgtcccttgttagctgtattcctaggtattttactctctttgtagcaattgtgaatgggagttcattcatgatttggttctctgcttgtctatttttggtgtatagaaatgcttgtgatctttgcacattgattttgtatcctgagactttgctgaagtcgtttatcagcttaaggaattttggggctgaaacaatggcgttttctaaatatagaatcatgtcgcctgcaaacagagacaatttgacttcctctcttcctgtttgaataccctttatttctttctcttgcctgattgccctggccagaacttccaatactatcttgaataggaatgatgaaagaagggatccttgtcttgtgccagttttcaaagggaatgcttccagcttttgcccattcagtataatattggctgtgggtttgtcataaatagctcttattattttgagatatgttccatcaatacctagtttattgagagttttaacaagaaggggtgttgaattttattgaagcccttttctacatctatcgagatgatcacgtgattttgtcattggttctgtttatgtgatagattacgtttattgattgtgtatgttgaaccacccttgcatcccagggatgaagccagcttggtcgtggtggataaggatatgctgctggatttggtttgtcagtattttattgaggattttcgtattagtgttcatcagggatgttggcctgaagttttccttcttttttttttttttgtcatgtctctgccaggttttttgtatcaggatgatgctggcctcataaaatgagttagggaggaattcctcgttttcaattttttggaatagtttcaaaaggaatggtaccagctcctctttgtacctctggtagaattcagctgtgaatctgtctagtcctgtgctttttttggttggtaggctattaattactgcctcaatttcagaactcattattcgtctattcagggattcgacttttcctggtttagccttgggaaggtttatgtgtccaggaatttatccatttcttctagattttctagtttatttgtgtagaggtatctatactattctctgatggtagtttgtatttctgtggggtcagtggtgttatcccctttgtcattttttatgtgtctatttgattcttctctcttttcttctttattagtctagctagcagtctattttgtttgtttgtttgtttgttttcaaaaaaaacagctcctggattcattgattttttgaagggtttttcgtgtctctctctccttcagttctgctctgatcttagttgtttcttgtcttttcctagatttttttatttgtttgctcttgcttctctagttcttttaattgtgacactagagtgtcaattcgagatctttctagctttctgatatgggtatttagtgctataaatttccctcttaacactgccttagctgtgttccagagattctggtatgttgtttctttgctctcattagtttcaaagaacttcttgatgtctgctttaatttcattatttacccaggagtcgttcaggagtaggttgttcaatttccatgtagttgtgtggttttgagtgagttttttaatcttaactctaatttgattgcattgtggtctgagaaactgttataatttcagttcttttgcatttgctgaggagtgtttactaataactttttaaaatatcagtgatttttccaggtaatagacatttatggctttgaaatttcaaagtatgtttaaacaaaaaaattcatcaacaacctcctcccacattctgcatttacatttatcattatcatgtgtgttcttatacttttattattagattgaaaaatatacaattgccattcttatagattaaaaatggtcaaacattggctatttcaaatagttcaatatgtaagtatctcaaaataatataacacatgctgttatctttatgttgttagtatttatgtaagtgctcatatatatatatgcacatatataaaaatacagagtatatcttcaatttgcctttttcataaataatttttctgagaattacccattttgatattttgttcattcattttagtttctctattagtattccactttataaaaaaaagtatggattatgtatttgtttccatgtggagagttagcttttctctttatataatttatagaagattgcaattaatattttgtatgtctccttgtgtgcatttgtgagaatttgcacagaaaaagcacagtgaaaggtatcataggcttcttaagtattcttatcttccattttgatatatcgccaaactgttatctaaagtggttgaaccaatttgccttcctatggcaacaggtaaaatacccatttgcctgtgttatcaacatgttttgttttccaacatttttgccaaaatcatgagtataaaatactcccttattttcgttttaattttaatttctttagtaactattaaaatattgaaacatatggcatttgagttttcgcctctgtgaattgcttgttctggtatatctttcattaaattttccattgcatttccttgtcagtaaaagttacacttataatctgcattttacatgttttaattatattgattgtaaaaatatttccttcagtggtttgacttttaaaattttttgtatttttggtctgtcacacaagagttttaaattttaacattggcgaatatatcagttactttttatggttcagatagttttatatcttacttaagaaattctcttttatcatgatatatattgccttctattttttctgaaattaatttttgtataatgtgtgaggtagagatttaattttaacttatctttattggcacattcttgtcccactgatttttattgaacacacattatttcctcactgatttttaaagccacctctactgtatctcaagctccaatttgatggtagtgtgtttaacatcttgtttcagaggtcaatttgattaacttcttgccaaaagctatagcacttgattatcttttgatatcttgcagtggattccttcttaccagccttcttcagctattgttaggtcttactcctccaaatgaattttaggatcagtttatataaaaatgtttattgagattttttattggaattgaattaaatttatacaacagcttagggataatttatattgttatgctgatttttttcatccatgatcatagtatatcattctatttatttagatcttcttttatgtcttttagtaaatttctataaataaaatactcataacttataataaaagggataaatataaaatttattcctaggtatctcaaggttttggtgctattgtaaatagtatcttttattaaattgcattttatatttattgctgatataaagaaatattataaattgttatatatcattcttatttccaacaccattttggaacacattaattcgaatatttgactatagatttatttgaattgttgaggtagaaaaccatgtaatttgcaaataatatatttatgtcattctaattcttatggattttacttcttttctttgtctgattgtgaggtctagacattcctttaacaatcttggaaaaaaaagcagtgagagcaagcatcctcaacttgtcattgctttaatggaaatggctttacattttttcctttaaataagatgtttgccatatcacgttaaaaactttcccacctattcctaattgtttagggttttctacttgtatattatgtatttttcaagacatggcagatttaatttgttgagatataattttcatgcctatgctaccaagtgagattggtcctgtcgttttcctttctcttaatgtccttgagaacatgtttcagctctcccatttatgacctgttttaccttgggcaaatttcttaatatctatatgcttcagtttcctcatctttaaaattagcatcaaaagaatatctttccatagtgtttttatgaggattaaataaaataatatacataaagcacacagaacagggcctgctactcagtatgcaatagttattagctgtcattgtcatcattaatattaagatattttaaaacacttttcccctaaaatacttagagtactttgatgcatatcctaagatctgtctctggctgctatttctggacatttctttgttgtaatatttctggtagctcttacttgtgactgtgaattgtagacatttgatgcccacagactattcagctctttcaacttctaccttgttcctaaggaaatctgaatcaattcatcagggtctttcctaaagaaatttgtcgaagttatccaatccaatgccacgattatatttcttcttgtatgattgtgtttttgttgtttgtcaaagaaatttttgcccaagtcaaggtcacaaagaattttcctgtaattttttctagctatattatagttttaggttagttctattatccatattgagttaaacttttacataaggtgcatgatatgttttcaggtgctttaaaaaacataagatatccaatattccaggaccgttcttggaaagaagagtattctttttccatttaattttctttgccacttagttaaaatacagtggactgtgtatgattttattatcagcattttcattgctactgaaatgcagtaggtatgcaattgattttcatgtattgatattgcaacttgcaactttgctgaactcatttataattcctaatagattttagtagatttcttagagttttctatgtacaagagatagttttacttctactttttcaatatggaaagatttatttcttctgcttgcctatttgccctgtctggtaactacagaaaaatgttgactagaagtggcaaaagtggacattgttatcttgttcctgatcttagggaaaaagcattttttcaccactaaatatgatgttagctgttggtttttcacagataccctttattagatgaggaagttgtcttctttaatagttagttgctttttaaaaattttatcatgaagtgttaactttgactatgtagctattaagatgatcatgacgtttttgtcctttatttttccaagtttgtgtattacttgattacttttcgtacattgaaccagccttgcatccttgtgataattccacttgctcatgatgtatgatcctttttgttagtactgtatttggttcactagaattttgttgaagacttttgcatctgtattcataaggcatattggcctatagttttcttttgatgtctttgatgtttttggtattagggtaatactggtttcatagagtaatttggagagtgtttcttcctcttctattttttggaagggcttgtgaagtaatggtgctacttcttctttaaatgtttggtagaattcgccaatgaaagcatctggtcctaagcttttctttgtggaaatttttaaaaaattactaatttgatctcttttagtggtatagatctattcagattgctaatttcttcttaagtcagtttacatagtttgtgtgtttcttggaatttgtctattttatctaggttgtctaatttttggcatacagttgttcatagtatcccttatgatccttttttgtgactgcaaagtcagttgtaatttcccttttttaattcctgattttaatcattagagtcatctcttttcttggctagtctagttgaatgtttgtcaaatttgttaataatttctaacaatcaacttttgttgtttttcttgttgtttttctattctctattttatttgtctgctcaaatctttataatttcctttcttctgctagctttaggttgagtttgtttttctttttctagtttcttaaggtagaagattaggttattgatttaataaatttctctttaaatataagtgtttacagctctaaatatcactttaaacactacttaaatcccataaagtgtgatatgttgcatgttcacttccattaatctcaaaggatttttaaatctttttgtaatttcttctttgatcattagttattaggaatgggttaattttcacacatttgttaattttacaaatttgcttctgttattgatttctaattttttctattgtgatccaagaatatactttgcatgatctcagttattttaaatttatagagacttgttttatggcctaacatataatctatcctggagaatgtaccatatgcacttgagaagagtttgtattctgttgttgttgggtggagtgttctgttggtgtctattaagtctaattggtttataaagtcattcaggtcttccatttctgtttgtattctgtgtagttgctctctccatgattgaaagtaggatattgaagtctccactattgttgttaaatggtgaatttttctctttaaatctttaaatttgtcattttactgttgttagacacatacatgattataattgttttattttcctgatggattgatatcttaaaatattcttgtctctactaaaaattttgtctaaagtctattttgtctgatgttagcataggagctcaagctctcttttggttattgtttacgtggtgtatctttcttttcattcttgaacattcaatctatttgtttcctcgaatgtagagtttgtctcttgcagaactcctatagggggtcatgtttgtttgtttttccattttgtaaatatctactttttgattgaagtgcttaagccatttacatttagcacagtgactgataaggtagttacaatgtcactttgctgttggttttttaaaatatgatttatgtcttctaaatttctctattctttcactgtcttctttgggttaaaaagttatcttctagtgtataatttaatacccttgtcatttattctactatgtttgttgcccaggatgttatcattaacatcttaattcataaaaatctaattcaaattaataccaacttaattttaagagtatgcaaaattttgcacctatatagtttttgttcactctgctttcttttgtgccgttattgtctatggagattttttacattggatgcccatcaacacagatatataattattgctttataaagtcatcttttaaaacaaatgtgagagagaaaaagaattacagtaaaaatacatttataatctttttaaatatttacctatttaattacctttacaggtactctttatttcttcatctggattacattgctctctaatatcctatcatatcagccagaaggacttcttttggtatttcttgtagagcaagtctgatagtgataaaacctctcaatatttctttatctggaaatgtcaatttatcctgcatttttgaaggagagttttgctagaaaaaatagtttttggtgtacagtttttttttacgactttaaatatgtcattcttctcccttctggacgccatggtttcttcacaagaaatctgtggttaatcttattgaagatcccatgtaggagatggccttttctcacttgctgctttcaagattttctctttgtctttgtctttcaacagtttgatttttaatgtgcctagggtgtggatctatttgaatttatcccacttgcagttcattgagcttcttggatgcatagattaatagttttcatcaaattttggaagtttttggtaattatttctctaaatattctttcagtccttttacctcttctctgaaactcccattatgcctatgctggtactcttgatggcgtcccacagctttctggggctttgttaatttctcaacattctttctctttctattgctcacactgaataatctcaattgacctgtattcaagttcattaattatttcttctgatcatttagatctgctagtgagctcctctagtgaatttttcatttgaaagttttctattttctatttattttttctttttttgatgaaatgaggtctcactacgtttcccagggtggtctcaaactgctgggctcgtgatcctcccacctcagcctcccaaagtgctgggattacaggcatgagccaccatgcctggctaaaaattttctatttcttttctcatattctatattgtctaaagcatcattgtcatactttgctttagttctttggacactttgttttgttttgtttttagttatttgaacatatataaaatagttgatttaaagtctttgtctggtaagtttaatgtatgagcttacaattgacccatttccattgcccatttttcttcccctgtatattgtttgtaggagtttctttgcatatgccatattctttgttgaaaaccagacattttaaacacatagtgtagcaaatctggaaatcagattatttccctttccagagttgttttgttgctgctatttgtcactattactactgtttgcttgtttagtggctttcctgagctaattctgtgaagtctgtttctttgtcatatgtgataaatgaagtcattgtttgctcatcttagtagtcaggcaatgactgaacagagaatttcttaaatgcctagaaccaatacattttccagtctctggtgagagatctgtacgcatgttgcagaatgccatcaacactgaggcagtttaacactctcctttagtccccacttcctgcttgtgcagagcctcaaagtcgagctgaggtgagaccttaggactttctcaggtctttctttagcatgcgcatatacctgagcacatacttagccttttgcatgttcataatcttgtagattcgcaggcattttttaaggatttgcaaagcgtttatggacatgatgtttcacatcttctccttttaagtattttggattgtttgttgtttcttctgactgttgttactgcctgggtcaactgcaatgttaagcagttgccagtgattatttttagcaaataattgttttaaacaaacagagtaaatgctgtttccagtggatgaactctgagtcaattcaagccttactagtggggctttccatggtacttccaggcagatcgaataatgacaatcatctgaggatagagctttgaaacagctccactcccattctgatcctctagcagtaactaggctgctggttttcaccctgattgcaaactgttcattttcagggcttccagagagtggcagagaggagtacgggaataggaaagctaaaatgccatagaacatgttgttcttaccaatattcagtcatttaaaaaataaacactgtccacattgttgcaagtctttgctttatttccagagttctcaataagttgatgtgatattctttgccagtgttcccattgcttttatggaagacagactcttccattgttttcactctgccattgctgatgtccttttattcgtttcctcaatgtcttatagtttttacctatatacattgccttgctttaatagatttataactaatatttcacattttcagtgctaataaaatagtatttaaaagttttaatttccattggttaatcactagtatatagaaattaaattattactcatttaacttctatcaaacaaaattaactaattcacttgttatttctaatagcttttatgtacagtcatggaaattttctgagtagataattatgctatctgcaaatgagagtttatttctttccttctgattgttgtgacatttgttacttagccttattatctgtttttaccctgatttatatgttggattacttagttttcccatttgactaattttgttgtgccacccagttgtaatgcataacaacttctttccagtcatcacctgtctattttctgactagacagctatgaggtctttcttgtatgagtcatgtctatttccttgatcaatttatataatttagacatatctttgccatatgaatatttttcaaagaagaatttttatggaatgtttatcccaatgaatatctgttgttaaaaaattggcaagtagcaaaggaataagtaaaatttatttctatggctgtccttgaaatatttgatagtattctcacctcaaatcataattcttttatttgggatggatgattcacattaactctaggtctttagaaaacttgctgtaactcttttttatgaagaatttcttcaaatatgaattctttagcaatggatatgattgcaagctccaaaatttaaaactaaaatggtttttaaaggttataaaacccagcccctttattttatagataataaaatagatttcattatccccctgcagcagagcttccctttagctattattaaaatatagggagtgaattctaatttatcagcattgaaaggtacacctccacttctaataccctggtctgactgccaacatttttcacacatatgactgtaatatcctcctaactggcctcttggcttctactcttatcttcctatattctagtctcagaacttttgaataatcctgagatcacatcactcctcttctcaaaaccctccaatggcttcccattttactcagaccagaaatcaaatttcttacagtaggctattagactttgtatatataacaatttgtacctccatcctcccctctcccccagccagctacttgtctgacctaaccttctaataacctccccccttttattctgctccaggatgctagctccttgcacctcctctaacatgccaagcatactgatttagaggtctatgtgcttattaatgcctgcctggaacattttgcccctagatatacgtatgactcattcccattcccctgtcaatgccacattctcaatgaggcctctcttggacataacatccccactaaaatctagccatgctctccaacctgctctaatccttctgtttttcataaaatgtattgcattctaatatactatatgaatttctcattcattatgtttatctacgtgaatgcaagctccataaaagcaagggtattttgttgttgttgttaactgattgtacttttggcactcgtgaaagtgcctggcacataataggcttccaataaatacttgtgaatgaatcaatacgtaaaagaatgaagccaccctgacatttaaagccatggttcaggctttagcaacatcacagtgttcatcagttttgctgtctttcagttatggtaagtctttcaaaattatgaatggctagcccctgtttgttatgatctgggttctttgagataaaacacttccctagaggttatataaaatattttagacaatattttatcctgagaaagcaaattggataacatgaaatgcaggtaatttctttttttctccttgatatctcattatgttggcaaaaataggaaatgaagactgtcagttttccacggctgccatgcaaaagtactgcaaactgggtggcttctcccagaaagagaatgcctaggactatagcggggcacagaaagttccccacaaggagtatttcaaagctgagacattaggggctgtatgaggcagaaaaattggaagcagaggcaaaatgggaaccttagggctgagagagcctgaaggttgtggggcattaaaaattcatgctgtagattaacagtgtggggtgtaaaggatgctaggagaggaagaactgagcatggttagggatagttgaaggtaaagaaaaaacgggacacaggcccagcttccttgacaacattatctcttacctcataaataaaatttatgctatgaggagtgactttcctattcgtctttcctattccccaaataaaagcataggcacacaatggctttgctgtatttgcatgtattcttctcatctttcttctaagaatgacatgtccatctttctaccattccctctttgtttaactttagatcctggatccaggtcaattgatcataaatcatgttgcctggatggccaattaactgaaagaatattttaccatgttttcttatttcttgtaactaattataaattttagaacaatttgtgttggaaatcttctaaagatttctgcaaagttttagtagatttagttttgtcttcataacaccacttggaggaataattctttgcacttgtgccagctgcctgttttaggatagatagagtagagaaactctccctacgggaaagtcagagcaggaggctgcctagagcacatcttcttgtgggcctcagctcatggggtatgtggaagactgagactaatgggtagaaagagagagcctataagtgtatttttcttagactacatcagctgagaatacactaatgaagaaatatttttatatgtaatattttggttattttctcaaatatattatttaatataaatataacatgtaaatatatgaatatacacaaatatatgcatacacacactcacacacagacacatactctttttaggctcctaagtctcacactttgcttgtgagtttcttcctgattctgagatcactatctcagactacttcgtgtgctaattctcctctccatgttttatttatcagccatatcctcactctgtcccagtttcctccaagcaaccaccaaggagcagcagaaaacataaatcaaacattctttaaaactctatcaagacagagtgaaaactgaatagttaaaagaaaaaacacattgggaaaatggtcatttgatgattaaaattgctccaattttatttttttagaactattgaaataaacaattattgaaataaattttgttattaaaaatataacaaaaaacttggagtcggtagtttttctgctttattctgtctccactctcttgggcttatttgtctcagtaagttctgaaaaaatatttgccaaacaaataaaataataccatgtggattaaggttgatagctacatttgccttgaaaggtcacctaattcaaagtagattggtctttgaacctggttttcttagaagattttccctgaggcaataaaattctgagagtgaactatgatactattgatatatgtgaatgacacagaacctacaagtaggaagtcttcgatgagtcctcatttggagattttctagaacagacattaatttaactttagagagaacccaaacagatagcctggagcttggagctataacaggtgggatgtgagagtgaggaatcttccttttggcattgcaaatactctggaaattgcaatcagaagcagatgacaatcaaatttagggctgatgagataatatatctatggagttataaactagagagaaatttgacttgggaagggacttctggagaaagccatgagttcgatcagtaaataggctggccaaagtattcactttgacttaagtcctacagtgtccatggagataactatgattatttttgttattaatgtggaattagcaaactagagattgatctgtaaaagtttcaaagggcagtgacataaatatctttttaaccttaacatcttcaaaggaatatcacttaaatacttgtcaggtattgcttggtaaacagagacttcttatattatgcacatgtgtgtatttgcaggtttagagcagtttgtcggaagaatgcaagattttcgattataccaagtggcacttacaaacaggtaagcagatgttgcattgtaaacctcaagaaccgaaaggataaatgctgaattcacttaaataagaatactatgtagattataccattttttatctttataccatttggcaaacttcacctaattaatgtttacagtgtttgctttggcttagtctatggttgttattcactagtgctactcttgaggaactccttgtaatatgaaattgatcacatttttcctaaggatattctgtaagaaaacttgatatttgaacattttataaaacttgggatacaatgcttaaattttctatatgaggtagtttctattaacaatacttgagaaacttctacatctgccttttttaaattggtttgttgactttatacctactagagaatgtagaacaataaacgtgattaattattttgatacatgggaaattctcaagagactgatctattagacttggagacaagaagaatgagcatttgaagtattgtgatatatttttctattttcagtgaacaaataattatatagactcaggctagctttaatgacattatttccttatcttgagagtagatgggaaatctttcttagggcttcttaaaagcacacagaattttaaaaaatttaagtgaaattctgcttaggatgcctttgaactttcttcttcagcttatgatatcatggtataatagtatattgttgtatggatgagttgatcttatttacttctattaaaaatcaaaaagaagaatgttcattcatatttcttcaaggcagatataaattagtgtggtgggtttccaaatgagaagactagcccttgtaaatttagaagcattgcttttgatgtggttcttagtccatggcagatcattaacaatataaacattctttcttaccaggctatataatcaaggtatgcctcagtaaagggtgccatggccctggaacacagtgttaggtgtatttactgccaaaagccttactatattttagatcacctttgtctaaaatgctgaagggcaatgttgtagtaattctttgggaataaagtttttccttgggagtgaaagattttatactggattctatactggtagcttttggtcccattcaaaacttggtatcagttgaaaagaattgatgagatttaaagaaggtatgacttcatgtgatttaatgaatggaaaagctgcctgactccttcactgctccactggggtctgagaggaaaagcctggtttctctggtaagaccttgattactaattttggcctacctgaaatgtctgggaaggtgctatgtggaagaatgcctataaatagaatgactaattctggtctagaacaagtatattgcccctaatggaaaaattaaatatatctacctggaattggcattctttgactgttggcagccgccatatgatctgaagccaatgaagcattacaggatgtcaggatctgtactgatgagtcacaggaaaccattgacaaatggccttggcctcagtccttcacttaaaacagaagcagataaaatgatacttgctttcgtacttctttcccatggatgaactgaaaacattatctataactctcattgttctccatatattattgttcactctcagtagttagtttagcatcctaagtaaatgtgatcatttctatattatcacaaatagacacggtaaaatattgtggtatttaaataagtatcttaataatcagacaagggcttatgcatgcttcttgatataaataaaaagttaatattaaaatgtgtgggttttgatatacattttatgataatgaatttgtttatttggccaaaaataagttttattttatgtttcatgcatcaaattattaaaactaaatggatactcatgaaagcactaaacgagtgacattcatttgtaacgactcctagaagttctattactgttaagctctttgtccttacagtctccctcttgactcccacagagagattctggaagtcttctctggagatcttctcagattgcatgcccaatcacattgccgttgccctggcagccacccgcgggtccaccctttggcacagcggtactgcattcctaatgatgcaggagacacagctgataatagagtgtcacggttgaatcctgaagcccatcctctctcttttgtcaatgataatgatgttggtacttcatgggtttcaaatgtgtttacaaacattacacagcttaatcaaggagtgactatttcagttgatttggaaaatggacagtatcaggtaatgagaaacgataaggtgtacattaatttcctgtggttattgcaacaaatgcccacaaacttcatgtcttaaaacaacagaaatatattccctaacagttctggagatcagaaatatgaaatcaacatgttggcagggctacattcccttaaagattccagaggaggatccctccttgccatttgcagctcctggtggcccttggtgttacttggcttgtggcaccacaacttcaatctctgcctccattttcacatggtgtccttccttgtttctctgtgagcatcaattatcccttttctttctcttatataaggcccaccctattagacccaggatgatctcatattgacatccttaattatactgcaaagaccctatttacaaataaagtcacatttacaggtttggacagtagtacttggacatatctatttgggaacacaattcaacccactacaaggtgaaaactgaactaggcaattgaaccttgcctcaataaagtagtgtattataatgtatacaataaaaatatctaaaagacaacatgtaggaccttatgtttgagatttgtatcaaaatgatatttatgaaatgttgaaaataattatttttattaagtagcaaaaattaatacaaactaaggtgctttttctaaattaagaagtctctatatatgacatttatttcatagaagtaatgttctttgtttatgtctttatttgcatgttgatttataaaatccttgagcaaatgaacagatacacaattatagaatatgttgcttttaccacagggctatgaagtttctggatgtctaatacatatttgataactataattatgatgaagtgagccaatatatttgaatctaataattccatggtttgatatatactgatggttaaacttaaaactttaattacattaattaactttccattttcaggtgttttatattatcattcagttctttagtccacaaccaacggaaataaggattcaaaggaagaaggaaaatagtttagattgggaggactggcaatattttgccaggaattgtggtgcttttggaatgaaaaacaatggagatttggaaaaacctgattctgtcaactgtcttcagctttccaagtatgaatatttttaaacaattaatttaatagactgattggttattaataatgtacaagtatgctagctctctaggctggtggagacttcccttcaccaccaacttccttgaggcagattctcctaagtcttatccctaaattgggcttaaaactatgtttaaagttcttgtaaaagacattagagtgactcttatttcaatctcactgatgtttcacaatctgattttcagattgtttggcaagttatctatgtaaatagaattttcattatgttttcaaggaactgttttagtgtggctttctatgataatcctgtattgtttatatatgaaatatatggaatatgcttttcctagaatgaataatttaagcttttattgatactgtgtagtaatttctcaacattttgatttctgttttgccaaaaatgtgaatagattttcatgacatcgaatttctttcattaacagttttactccatattcccgtggcaatgtcacatttagcatcctgacacctggaccaaattatcgtcctggatacaataacttctataataccccatctcttcaagagttcgtaaaagccacgcaaataaggtttcattttcatgggcagtactatacaactgagactgctgttaacctcagacacagatattatgcagtggacgaaatcaccattagtgggaggtattattatgaattttgttttcaacaaggtttttgtcatacttactgtcttaacagcacattaagatgtcagagcaagccagatttcaagctttacattttgaaatgatttcatactctaagattttaggggaagatctgtatgtgagtcttttctctatataacattgttatatatatatatatatatatatataaaacgtattttataaataaatatatatatatttatatatacaggaattgattttcaaaagctgttgcttttagaagctatgatactctgaatctgacttagaagtgatttatccaatattttacttgatttgttctggaatataattttcaaatattctcaaaagcaaagagatggagctgaatttggagttgtaactatagcaccagagagtttttaagtacagatcttgatctacctgagttcatagtgcacagttccatgggtaatacttgtttttctttagtggaaagatctgatatgccctaagtagtttataaatgtctgatcataattgagaacatgactcacaatatttaaaaagaaatgacagctgcaaacctaggcagcatactgtctaatatagaaatgtacatatagagtatatttagaatggattgttctggaggaatgataggccttgtgaataaaatatgtctttaaaagcagaccaaaataccagtatataagcattgtttgtttgctaagtcatagcataatgaacaaagcaatactattaaatattcatcatctaactttggaaaaaaaaataaaaaaattgaaatatgttaactgcattctgcagtttattgtcaactttatattcttttttctttcttttttttttttttttgacaggcttttgctctgtcacccaggctggcatgcaatggcatgatcatggctcgttgcaacctcgacttctgggcctcaagtgatcctctcatctcagcctccaaagtaactgggactacaggcatgtgccaccatgcccagctgattttttttttcactttttgtagagatggggttttgccatgttgctcaggctgctctcaaactcctgacctcaagtgatctacccgcctgagtctcccaacatgctgagattacaggcgtgagccaccgtgctcagcctgaactttatattcttaactgtattttaaatagtgtagtaaatgccttcccttggtacgtggttggtatagatataaaaaattccatttccctttagaggttggcttgaaaattatctttacaatacacgggtttggatattggtgacagtccttctgacatttccagataaattaaaaacgtgtatggatatccacacgattaaggagaaactgattttgtatcaattaaatatacaaaaatcttccctgttaaattcacataatgcatatagtcctaggaccttaaatatattcacagttgagttggtgttccttaggagtgtgtgatgctcatgtttgcagatgtcagtgccatggtcatgccgataactgcgacacaacaagccagccatatagatgcctctgctcccaggagagcttcactgaaggacttcatgtgagttctattttatgcatggaaatctaaaaaaaaaatagtagagatggtgactataaattctatgaacttaatcttggcctaacaaatgaaaataaatttaaaaactgatatgaacttaaaatgtcaattattgcagattttttaagaaaaataacagccatcaattaagttgaaattgtagtttttaaaaataatttcagccagagaaattacaactgaaaccaaaccctaaggttcttttctcttttgtttttctttctttgtttcatcagcattatcatgttttataaaacaatttttaatgtgtttggatagcatggcactaaacaaaaaatagtttgattcttactaaagggtatttatacaaaagtatcaataaacaaaagcatcgttagatgaagaacaatgtttatgtatttatgtcaatcaaggttcatttattgctaatatcaggcattttaattaattgaaaatctatagtaaaatgatttatgagttatgttactttagttttctgtgacgatcaggggaattccatagttgaggtggaattttagcttcatctttagggaaaagaggtaagtggaaataaaatcaagaaacattcgttggtaggaatatctagcaacaacatcagaaatagctgatatgaaagacggttcagcagcagtaacaattataccaataatgagagtagataatatagactcttcagtaaatatgtttaagacaactggctgctaatttgcaagaaaataaaattagagctctactgattgtatgtacaaaaatgtatgtggcttaaacttttagtgaaaaataactataaatatattaaaataaagattagaattctatatcttaagttgagggcttttatcagctaagcaaatgaaatacaaacagaaacaaacatctggagctatgaaggaaattaatgacatattctgttatataaatatttaaaattctacacagtataagggttaacataaatgtaaggtagtgataaatgatggattgatagaaaatatttgcatcatgttaacaggtaaagagttaagattcctaacacacaaacatttacaaaatattaagaaaaatataacagtctgataaaaatgagcaaatatatgaacaagcaatttacaaatgaacaaattgtaactttaataaacatataaaagattacccaacctcagttttaatcatattcaacaattgtttttaacatttcaaattagcagaaaatataaagattggtaatatttagtacttgtgggaatataacctttaacacatcactgatgggattgccaattgacacaatagttttggggaaaatttgtccacctctactaaaattaaattttcaaatatagtgaactacattatataattgctgtcattctgaaaagcagttcttcaatgacaagtgtatggaatggtgtattagtctgtttgcattgctgtacaggaagacctgagactaggtaaatataaagaaaagaggtttatttggcttgtggtactgcaggctatacaagcttggtgccagcatctgcttggtttctggtgaggcctcagaaagcttacaatcatggcagaaggcaaagccagaagccagcctcttttaaacagccgtgtctaaacagccatgaactaacagagtgaggtctcactgctgaagggaaggcacttcatgaaggatccacctccataacccaaacatctcccaccaggctcacctccaacactggggatcacatttcaacatgagatttggaggggacaaacatacaaactatataaaatgcttatatttctatcattttgttacataaatatgggcttatatgttagtgcattttagcttttcagatggtagcactgtctcatacactcatgtatgacttgtgaacatctctgcctcttggaccttgccctacacttgtgttttagttagttacttcacttctctgtgaaatttattttaggatattatagagcatcttgctttttaaaaaaccatctgtaaaggttttggcaaattccatttctgtcttctgattcttactctgatctaatttgcttttgactgtaacattagtgagaatagttcaatggtaagaatattatctataatgcagactttctctagcacattcaaaacgtagtcccactcctcagtttcaactaagagtctttgatttagttatggcctactttctttctttctttctatgtgctcagaccaaaactttcatgttctaatttagatattcttttgaatttattttctagatcactactttatatacatctagtcctcaccattagtcaatacttgctttaaaagaagaaatcttttatggttttcttttggatttctaatgcctagagtctttgcatttgatttcattagtatattatgaggaaaaatcttttagaagaactgattttaatatgcttgattgtatggcttatcatattgtcacagaaatgaaattaattggattaacttgattgatttattcttcactgagccataattgtgtgtttaaatttttgccaattttatttgttctagattttaaagttaaagcaacatttattatatttttctactgtcttcttttgatcccttaagatggacacttacttccttataatcagtgatttctttcattaaccttgtcctctcctccacaaagccactaacaccccaattaaaaaatgctttgggatgaatttagcagggcaccttgaactgaatatgtctagtatttgcaagctacagtttggctaataccttcatatgatatgttcttttctgagcttctcttgctttctgttgactagtcagtcggtattagtctctctcatttgcttgtgacgtcctgtcttgttttatctttctgtctttaattgctcacagttaagtgttggatattttctgattcttggatgatttcatgcttccccttaaaaatagagccattaaatgaatgaaggctcatgattggtttcagaagacaagttgggattttcagacttggtctcaggtggtgaatgttggattatgaactagtgaattaattaactataatttgggttgagaatacattttaatgcttcttatttagaccttaagtaccttttgaaaacaaaaatgaaaaactaaactttttttgttattttcctccttgacatattttgatagtttatgaatttagccataaattttaaaaagcaacaaatataatttacttagcaaactttggcaaatgcaaatgcagctgcagggaaaaagtcaatagactgttaagttgaatgatttctcagtcctatgatattttcaataatgtgttgaaaatgaaaaatgattttatagaaacattcataggcatgacattctcctttgttaccattcaaagtattttaatacaagtagagacttacatatctgagaaaagtcgtcttacggtaatttgaaaatatacctattctaatgcttttcttgttgttctactttttaaaattatacgttttaatataagccattcacttcctattgggatccatgttctttttaagacctggacataatccaaaaagaatgtcttcaattccacagtgttatgctatccattaataatattacttaataaacagggcttttgtgaattatattacagacatttggcaaacagatgaaaatgtaaggactgaaaatatgccaattcttggcaattgtctttcctatgagaaagtgtttttagtagaaacaaaaatgaatgaagttgagaaaaggtgaatggtgaattcaggggcaggttcacatatttagccatcctaaggaattttccgtacaaaatactattcatttgtttataaggtcaatgtcacaaattggtggctcacaggtagaaacagtgtttaaacagttttaatttaattttctgcaagagttttcactttaaaatatttatttattcttcaatcttttttatttatttatttttttgagagggagtctcactctgtcaccgaggctggagtgcagtggcatgatcttggctcactgcaacctcagcctctcagcttcaagcaattcttctgcctcagtctcccaagtagctgggactacagctgcacaccaccacacgcggctaactttttgtatttttttttttgtagagatgggtttcaccttgttggccaggcaggtcttgaactcctgacctcaagtgctccacctgcctcggactcccaaagtgctgggattacaggcatgagccaccactcctggccctcaacttttattttaagttcagaggaacatgtgtaggatgtgcaggtttgttacttaggtaaaggtgtgccatggtggcttgttgcatagatcatcccctcacctaggtattaagtccagaaaccattagctattcctcctgatgctcttccccccacagcccccaccatccctaagaggccccaatgtgtgttgttccccgacatgtgtccatgtgttctcataattcggatcccacttgtaagtgagaatacgtaatgtttgattttttgtaccggcattattttgctgagaataatgacttccaactctattcatgtccctgcaaatgatttatatttctggtaatacacagtaatgggattgctgggtcaaatggtatttctgcctctagatctttgaggaatttccacactgtcttccacaatggttgaactatttatactcccaccaacagtgtaaaggtgttcccttttctccacaaccttggagcttctgcacagcaaaagaaactatggtcagagtgaacagacaacctatagaaggggagaatatttttgcattctatccatctgacaaaggtataatatccagagtctagaaggaacttaaacaaatttacaagaagaaaacaaccccattaaaaactgggcaaagaaccctgagttagcgagttgttgccaggggaggacattaatgtcttcttttgagaactgtctgttcatgttcattgcccaatttttaatggggttgtttgtttgagaacagttctcaaaagaagacatatgtgtggccaacaaacgtatgaaaaaaagctcagcatcactgatcattagagaaatgcatatcaaaaccacaatgagataccagctcatgccagtcagaatggcgattattaaaagttaaaaaatgacacaaatttttaattcctcacttctcttaatcagaacatagtctaacactgtgtccatttcctgccatcaacaactcactgattcagggtgacatttaccacatttacaacagtatcactcttgggcttgctacaacattcactactatgtatatccttatacatgggcgacatcactttggtgaactacctggccttgaaagactcggagcttcttaacctcctaaagcaaaactgatggatagattgagacactagaagctagaatacatttttaattattctgagtagagaaagaccagctgttcattgctatattcattgttaactcctatttcttttacccctttataaaaataaaaactcacaaataaccgaaaacaactcaagaaaatctattagcaaagacactgtttactctgagatgaaattaaagccatgcttactttttttttaattacatttttgacatctaaaaacatttaccttggggagcctcactgattctcctctgcactctttgaccaggaactccgatacatttttgtattgtactggcaattttaaggccttgactttaatgtatgatacataccataaatacttcactcatagagaatacttttagaatacttgtcgcatttctttccaagaatgaaaaaaaagcagtaaatgcttaatttactaggctcactttagaactgatttagggtgaaacaaatccaaaagcctagatgctattcattaactttcatacaaagttaaatatttcaaagtagaaattagaaatacatggtattgaacttgcatgaatcattatatatctcacaagttacaaacatgttatttataaatgtttaatttcatttgaataaaaaatagccactgttacttgcatttttaagtaaacttttaattttgagataattatagatttatatacagttgtaaaaaataatataaagacaatttgtgtactctaccaatttgtcccatggtaacatctggcaaaactagtgtttttttctttttacatcaaaagtgtgatttgtgtacaataaaatatacccacttaaaaatatatagtttgatgagttttggcatatgtgtaccctgtgtaatcaccatccctgtctagagatggaatgtttcactctcccaaacgttctcttatgcttctttgcagtcagtgctgtctctgaacccccaatcccaggaaaccaccaatcttatttctatcaatacagattagttttgcctgttccaaaatttcttagcatagtgttatttggtatgtaatattttcgtacataggcttttaaatcccacctcacccccacttttagatcattccctaattacatgtgctgttagctttactgcaacatggtatctctggcccacttaatcagaaatccattataagtatcaaagtgtatatattaagctcataggtacataatacaagctaggaattggaagcctgggtttatctgtcaactaacatatttgcaaagctataatatatttattacttctttttcttatctagtactttctttacttgatctaagagttcaagtgttgaatagaatctagttttaagaaaagtgttgtcagttgaaacttgaatccttatgagttgtctttttcctttaataactacatttacctttcggggctctggccaagagtgatgcaatgatcagtgtctcagccaagcattggcacttcattggctacttagctattctttcgtcattttgtgacatcattacctgcaagggtagccaagccttcacagagcaatttattagtaaccatgaacacttcttattctttggctctaacttatgacccttttataacattaatcatagatcttatgaattaactacaatcaaactatcagtataaatttttgttagcattataaatagcacagccagcttgaaactttttatataataagccttcctaccactcaataatttgaatggtgccaacatcacactctagaatgcttattatataaatgaatatttctgttatttttgaaagattcctttagagcaccaaagtccaaaagtatgaatcatcatgactaatttgtgtcatatttatattatatatcaggctttaccactgcttattttttctctgtttgttcgcagattttaccctaaatatattttatttatattttaattattgtaatgctagtaaattaattcatttttatataactagcattcacacagttcatattataggatctacatttgatatatgtttagtaagtcaaggtaaagaattttctttcctcactgacatgatgatattattaatctttgaaaaacacttgtactagttctttccgtgagataggtatgtgcataaatgcttttaaaatataagttgaaaacatgaaaaagaggttatgagcatggagataaattaagacagccttacagaagaagcaaatagagatagtgaaagtataaacatagtaaaagaaaagataatatttgaagggataagagtaaagaattatctaaaggtgaggaatgacatgatttttctgaatcccaagtaggctaagaaaagtaaatgcatacataggtataatataatgaatccaataatcaccaaagaccaagcagccagaaagacagaaatctgataatcaccaaagacagaacagcatcctaaaaacagccagagagaaaaatacaaagtgtaagaaattaatttctaagacactactgatatatttctcaacagccacaatgaaagccagaagacagcagagtagtgcctttgaaatgcagagagaaggcaaccaagaaatatggaattgtatttgtagtagtaccatcaattagaaacaagaaagaaagaatgcatttttagtttacagatatatatatcaatattatcaccagcagactctcaataaaagaatttttcgagaatacttttcataaggatatataatgtttccagaaaataggcctggtgtgaaggaaggaattgtgagcaagtaaaccagcaaatatgtggataaatatagaggaaaatttactgcgttaaataaaaataaggttatatgtaagaaagagtataaaaagtagcaggataccattaaatggtcattaaaaatagcatttaaagggaaggggtaaactccaacttcagctccctctagccattctgttgcaccttggggtaagaagagcagttactgagaaatacttgtaaagttcacagccaatgagcacagggctcattaaaaactgaaaactaatcctagaatcatagaacaggggtccccaacccctgggccactggtcagtagtggtctgtggtctattagaaaccggactgcatagtaggacgtgagcagctggtgagctatcattacttcctgagctctgcctcctgtcagatcagcagtgacatgaagttgtcataggagcataaaccccattgtgaactgtacatgtgagggatttaggttgtgcactccttctgagaattcctgatgctttgaggtggaataccttcatcttgaaaccattccccatgtgctgccctcacacccagttcgtggaaaagttgtcttccacaaaaccgatccctggtgccaaaaatattggggaccactgccatagaacgctttccctcccctctcatcttaccaccacaccatgaaaggcctgtttgccagagttccctttactcagtacatcatgtctggatttcaacaaaaagttacaaagcacactaaaacaccaaaaacaaacaaacaaagaaacaaacaaacaacctcacagtttgaagagagagagcaaaaatgagaatgagactcagacatggaaaggatatggaaattatcagaccagaaacttaaagcggctctgatgaatacactaaaggctctaatggaaaaagtagacaacatgcaaaaatagatggcaatataagctgaaagataaaaattctgacaaagaagcaaaaagaaaagctagagatcagaaacactttcatagaaataaagaatgcctttaattggatcattaatatttggggacagctgataaaagaatctgagtttgaagatgtgtcaatagagactaccaaaatagaaaggtaaaaagaaaaatgactgaacaaatagagcagaatatctaagaactgtgagacagctaccaaaaatgtaaatacatataatggggaagaagaagaagaagagaaaggaacagaagaaatatttggaacaataatgactaagaatttttcatattccaaatgcagaaaaatcaaagttagggaaaaatatcttaaaaggagcctggctgaagggggaacatctagcctatgaaaaagcaaagataagaattacattctacttctcctcagaaagcatgcaagcaagaaaagtggttaaatagttaggtgttgacagaaaaaaaaaaatccacctagaattctgtatcttgcaaaattatcctttaaaagtaaaggaaaaatactttctcaaacaaaaaccagtagacttttcttgccttgcaagaatgttaaaggaagaacttcagagagagagaaaaaatgatacaggtcagaaaactcagatttatgtaaagaaagggagaacattagagaaagaataaataaaataacttttatttttcttatccttaattgatctagtagataccagtttgttcaaaattataataagaacaatgtatttcattattatagcatgtgtgtaagtgaaatgaatgatagcaacaatacaagacaccagagggaggaactaggaatactttattattattaggtactcatgccaccttttaagtggtatcgtgttatttaaaagtcaacttggaactctcgcatgacattattttgtcttgatagttcaagctccacctgcggttctcccgtcctccatgccaggtgtcaggggctgctctggatgttaactcttccgccccatgacttccagttccaaaatggcggcacagaaacaagctgccatgccacaaccccaccgcgcccctctcccgccaaaaagaaaaattaacaaatatacattgctgagattatcaccagaaattgtcacgatagtccagaactcaaatatgaagatataactgttcccagggccataaggaaatgagaaacaccaagtggatggtaagaaacctgactttcacatttgtagcactcgttaccccattttgcctgacaccaaatatgcagaagattttcctccaactcacttttttctacactggaaaaattaagattgaggtaaacaaccagcttccccagccattctgggttaccggaaagagacctgtcctatccatgcctcaacccactggaagcgtcatgagtgcctaaagggagacatattcctgaagataggcagagacaaagggggatgtaggtctgtcatccccagcctgggaaagtctgctctgtaacttgaccaatgcagacacaatgtcagagtagctgcttagcagcactatgatgcaggaggattatttcactgttctcctcggcacaaacccttaggcagccttcccatactgtcaggatattccctttgggacctctcttgttaagaagggcacaattggattgtttactgaagccaaggcgaacctgggcttaaagcgccccctatagctccctagaggaagcaatttagcagcaaagacatagatgtatgtccacaagaaaaacagcagtaggaaactatgatgtctccaaacagacaaagcagggaaccagggactggccctaacaagacagtaatatgtaagctccctgaccacgaattttaaaatgcagttttaagaaaactcagtgatctccagtagaacacagaaaaataattcagaaattcattagagaaatttaacagagattgaaattttaaaaaatctatcagaaaccttggaactgagaaataaatttaccgaactgaaaaattcactagtagctctcaccatcagaatggattgagcagaggaaagaatcagtgagcttgaagacagaatatttgaaaatatatggtcgaggagaaaaaaagaacacaaagaaatgaagatttcctacaatatatagaaaattattaatacctcaaaaggccaaatgtaagaattaatggtattcaagagggagttgaagaggaaggattagaaatcttattcaacaaaataataacaaaaaattccaaaatttaaaagtatacttggattagttataaatgtatattataagctttatagggcaacccccaaaaaagttttaaaaaggtatagttgatatatttaatacttacaaaggaaagaaaatggaaccatgtaaaaatgctcaactaaaaccacaaaaggtaaaaagtatatagaaaacaagaatagaaacaaagaacaagggcaatgaataaaaagtagtagatattaatccaactatgccagtaactactttgagtgtcaatggtctaaatataccaattaaaagagagagattgttagaatgaattgaagaataaaaccagctcattttataatgccaacattaccctgtaccaacatcagacaaagaaattacaagaaaagaaaaccacagaccaataactctcataaaaatagatgcaaaaattctcaacaaaatattcaaaataaaactattaagcaatgtgtaaaaataattatatatcagaaccaagagggatttatctcaggtttgcaagactggttcagcattcaaaaatcagctaaagtaattcctcacatcaacaggctaaaggggaaaaattacaagattatatcaataaatgtagaaaaagtatttgacaaaatcaagcatccattcatgatcaaaactctccacaaataaggagtagaggagaacatactcaacttaatagaaaatatgtataaaaacctagagtgaacatcatacttaaggataagaaaccagaatctttcctactaagatcaggaataagacaagaatgtttcctctcagcactccttttcaacaacgtattaggaaggaataaaaacaacaacctcatttcaaaataaggcagtaaaggagaacgaaagaaaaaggatatatagaaaatagaaattccaaataaataaacaatcacaacaaatctaaatgtgctgaacatattagaattatgagactgtctggctgaaagagaaaacaacatccacctattgtctgagcagaggctgaattagggcaagagaatgtcttaatcacaaactttacaaaagcaccaaaaacaccctattaagcaagatctataatatttttatgttatatttcaaaaagtcaaatgatttagaaatgtataattaaaaatcaaaattttaagtaaagacacattagtgttgcttgttttatggtcctgtgttattttgtaatgggagctgttgtttctaatcagtccataattcctacctaccagttttataaggttggcatgtacctgtctcatagaaggttttacaatcgtctagaaacagactaggcatgatgggacattatacacagctatttttttaaaactgtagagtgtttattaactttttccatttggctccaaagattggtaaatattttctagttgtatacagaggttcgtatttttcctttgccctcatgctgcaatgcagctcagcatggtacttgtgctgagggtgtgagagacatactcaaaaaacaagcacacttcaagtttgaaaatttaagaaagctagcatgagctacataaatattaggcaaaacagacattactgtttcattaaagaaaaagaggcttattgtataattataaagtataaaattctaagtttacatgcatctcataatatagtttcaaaagtataaagcagaattttatagaaccagaaagagaaattggcaagttctaccatcagcatagaagaatttaatacatctcttattaaaaatgtctttttataaaaagaaagaaaagctacatactagcagttgtcattagcaagacaacacatatataactgacaaaggtaacatttaaattaagcaaactatttgaaaaacagacaaaagaagtgaacaagtaattcacagaagaagccagaagtggcaactgaaatggtcaatatacatgtaaagacatgtgcaactttactggttatcagtaaactaaaaaaaaagaatgtgataatattttatactcatcaagttgtcaaagatggcaaaatctggaaatttcaggaactggtaagtggggactcatacaccacttatgggaaggtgctgctgcactatggaaaacaatttgcaaatgtctacgtggaacactttacagtagtggatatgaaggaatatagctatcacatcaacatgaccagacttctcaaacaatcatactacagaaagcttgttttagaataatacatacactgtatacacttatataaattttaaaatcatacaaatagaaagaagaaactgataaaaggataggaggcaggactaacttgcagctccccctcggacagacagagcagcatgtgaagacacacatcatgaacttttctccaagaactactgcagcaacataccaggaaagccacgagaatccacagatcctttgaaggaaatagattgctgctgcaggctccaggagacagccgaaaaactgtaagtgcccaaagtgtgaaagggggatcttccacccctgaacacatagccttcctggggaacctgaaggtccaggtcacaggtgatggatttggccttacctggagctgagacaaacttagagagctgaacaaaatataagggtaaaggaagcagggggaagagccctgtggactctctcagcccccaggaaaaccatttctgactttgtctcctagggtccttgggtaggactgccagtggaagtggggaaagaccacaaggagaaggaaacttccagatgaactctgtaacaatttcgactgaatgccaactttcctagcagaatctgggggtgagggtgaactgggagtgcagacacagcacagaagttgcatcaggcagggaggtgtgaaacctgaaacccctgcttgcttttccagtggggagacctggagcaggggcaagtcctcagccctgttcacccattgcctggaaataaactcagtgctgttgtggagagtattgtgggagtgagactggccttttgggttgcatgggagctgggtgaggcctttcactgccagctttcccctactttcctggtgacctgtatgatgtagcagaggcagccataatccccctagaaacataactccatcgccctgagaaccacacccccaacactcagagcagcttcagcaaggcctgcccaaggagagtctaagctcagacacacctaaccctgaccctacctgatggcctttctctacctgccctcgtagccagacaaaggacataatctcttgagagctctatggccctgaccaccgcctgagaaacttatccaggagactctagagcaagcttgtatcctccctatgctactgccgttgatgctctcttgaaagcgccacctcctgtctgaaggccaaccaacacaaaactagtgcaataaacaaaaatacaacaaaggaccctcacagagtctacttcactcccctgctatctccaccagagcaggtgctggtatccagggctaagagacctgaagactgatcatatcacagggctgtttgcagttactccccactaccagtctggaggctgctagctccactgggtggctagatccagaagagaaacaacaatcactgcagttcagctctcaggaaggcacatcctggagcacccacatccagggagcacccacatctagggaacacccacatctggggagcaccctgtgggaagaaagaatctgaacaacagcacttgagccccagatcttccctctgacatagtctaaccaaatgaaaagcaacctgaaaaacagttctagtaatatgacaaaacaaggttctttattatccccaaaagatcacaatagcttaccagcaatggatctaaaccaagaagaaaactctgaattcccagaaaaagaactcagaaggttgattattaagtgactgaaggaggcaccaaaggtgaatatgaactcaaaggaatttcaaaaatgttacaggatatgaacagaaaaatctccagataaataaatagcataaataagaagcaatcataatttctggaaattaaggacacacttagaaaaatgcaaaatacactggaaagtcttagcaatagaatccaacaagtagaaggaagaacaccagagcttgaagacaaggcttttgaattaacccaatcaaacaaagacaaagaaaaaaaaaaattaaatgaacaaggcctccaagaagtttgggattatgttaaacgaccaaatctaagaataattggtgttcccaaggaagaagagaaatctaaacgtttggaaaatctatttgagggaataatcaaggaaaacgtccccaaccttgctagagatctagatatccaaatacaagaagctgaaagaacacctgggaaattcatcacaaaaaggtcattgccaaggcacatagtcatcaagttatctaaagtcaagatgaaggaaggaatcttaagagctgtgaggcaaaagcatcaggtaacctatgaaggaaaacctgtcagattaacagcagatttctcagcagaaaccctgcaagctagaaggaattggtgtcctatccttatcctccttaaacaaaacagttattggccaggaattttgtatccagtgaaattaagcttcctaaatgaaggaaaaatacagtctttttccgacaaacaaatgtttagagaacttatcaccaccaagctagcactacaagaactgctaaaagcagctctaaattttgaaacaaatccttgaaatacaccagaatacaacctccttaaagcataaatctcacaggacctataaaaaaaaaacacaatttaaaaaaaagcattcaggcaacaaatagcatgatgaatagaaaggcatctcacatcctaacactaacattgaatgtaaatggcctaaatgcaccacttaaaagatacagaatggcagaaaggataagaactcaccaagcaagtatctgctgtcctcaagagactcatctaacacataaggactcacataaacttaaggtaaagaggtggaaaaagatattccacgaaaatggacaccaaaagcaaacagcagtagctattcttatatcagacaaaacaaacttcaaagcaacagcagttaacaaagagggacattatataatgataaaaggactagtccaacagggaaacatcacaattctaaatatatatgcacctaactccagagctcccagatttagaaaacaattactactaaacctaagaaatgagataaacagcaacacaataatggtgggggacttcagtactccactgacagcactagacagatcatcaagacagaaagtcaacaaagaaacagtggacttaaactatgacttagaacaaatgtacttaacagatatttacagaacattctacccaacaactgcagaatatacattattcatcagcaggtgaaacatcctccaagatacaccatgtgataggccacaaaacaagtctcaatacatttaagaaaactgaaattatatcaagtactctctcagaccaccgtgaaataaaattggaaatcgactcaaaaaggaaccctcaaaaccatgcaaatacatagaaattaaataacctgcttctcaatgattcttgggtcaacaatgaaatcaagatggaaattaaaaaagtcctttaactgaattgtttgatatagtgacacaacctatcaaaacctccatgatacagcaaaggtggtgctaacaggaaagttcatagcattaaatgcctatatcaaaaagtctgaaagagcacaaatagacaatctaaggtcacacctcaaggaactagagaaacaaaaaccaaacccactcttattgacttaataaggaaattaaaaaaagtatgctgagattgctaagatctattataataatgaatcttctatctgtgaaatagtgaaaaaaaaagaaattagtgctagatttgctgtcaaaccacaaagtgcaaaagttacggccgcagtgctagataagtgcctagttcagattgaaaaagcattaaatttgtgactggaagacatgaacagaaaatatgtactatatggaaccaaaatatgtactacatagtacacatagtaccaaacccagttgctgtcacttggcacatagagatctggcatctactggaggtcttcaaatgtattccttgtggaaaacaggactacttactatactactaaattcagatattattagcggagtggaatatatatggcagtatcttgtttctaagttgagtggtacataaaatggtacaattctttttttaattattcataaatttatttttaatatttcagtataatttcccttaaacacaataatatgattgattaatctatcaggaatgtatcacctatgtaaatactcatgctactactaaagacagagtggaggtgactctattcacaatggaataaccattactaaattcatgattactgtgtacatttatagttttactgtaaagattgatcatttgctagctttagtcactcaacaaatatttataaatgccttctatgtgtagtgcattatgctagagtacagccattatgtcttgattacagatgcaagtatttgaaaatattgaaggaccttcatttgtgaaattcaaaaaagattccctggcagacaccaattactataataaatagagatgacttcagtgcaaacaaatgattcaggctaacaattagtaattaacaaataatataaatagtatagacattttaaatcttaaagaaaaatttaaatgcagcaatacttaagaaagggttttttaatttactaatgtagtaatcaagtctaatactacaaaaaatttctaatatgaaataccctttatatttaaataatcaaataccttgtataccagttgactaagtttagaggaatcttaaatattaaaaaacatcaataacgccttatacttcttagtatgtgaattcgtatttgtatgatgtatattattttggagagttgcctgtaagcaccatattaatataatgaatgaagcttttcttcattgaagtcctttgtaaaataatgcaggttatcctgaataaatatggtctctattccaggccatatttcctggaatatcaatagggttaaattattatggttgcaataaaatagaattgctttatcttgtccactatctacaatcttgaataaactttaaaatcctccttctgttctcttaagggaacgtggtgtgtccccatgtgtcttttttatttagtgccctgaacaatccataaataagaggaagaaggaataaagaaggacagagatttcaaaggagaaatcaaatacctaacaacatgcagtattgaaaattaacaaataagaatgcaaggcctctcatgcaaatggttccatctcattcaaccactagacataattacttctgtattcacaaggcctacagtaaggaaatactgtttaaaaaaataggctatcaattatatttatatatagacaacatgtagactgaaggattatccgaataatcctgcctagagtttctgtttttctaaatataggttttatgtcacgtattacaatttgtttcattggataattttccaatcttccatttcactttacccatagaattagactaggcattacttgaattagaatgtttctaaaaatagccacttatattaatagttgaaatattgaagtaactatgtatgatgtgtttgtcgtcattgtattgtcacctatgtttgatcagtattgtccaacagtattagtagttatttattttatgctattaatttcagtatctagagagtgagtaagtacattgtatctgtgaacactttaattatgtaagaatttctagccaagggaaagataattactgaaaaagggatatgtcattgaaggataaacacgtggcatttctgtcttctcagtggtaaagaatagtatttgttttggcttttccaattgaaattacataatctgtaggtaaaaattcacaggtgaagtattattgcatttgcctttaaacctttaatgttactattcaattaaatgctagtcacattaaagtacagtcctgtaatgtgtcataaatgcaatgagtctgttaggacattcactcacacattcaccaaatatatatgatcacctcccatgtgcaaagcacagagccattttctgtctagattctctatgtagttgggcactttatctgtgttcccctctgaaatctatcactgataataaattaacaagtttgtctaacattacctttgccatgggaacattagagctacctagggacacttccattggaaaaaagatacctgagtacactaaagtttttatgtttataaagatgatttctctacctagtagacaaatcacagtgaaactggatcctttgaattaccatggaattgctccagccagaggaaaggggaagccttgaatagagccggaggacaattactattattagagatttaggctcttaacatttccaacatagggggctggtttctactgatgagaaagggaaaatgtacagattttcagagggtctgcaattcattcaggccatctgggaatagttaaaaaaattacctcttttattcagtgagcagtactgtaacagtactaaaaagtgatcattttataatctttcactttgaagcagattgtctttctctccttctcacataggcagtgctgcatccatatctctaaattttatagccaggagtggaataactacatcttttggtttctagggctttgctgtccagtttagactcagcagaaagtaaagatggactgagccagagtgactccagtcaacacctctctccctcgaatactattttcggtccctgaagccagtataaacatggagattagaagtgaggtctttgaaggaaaacatccagatatataaattgagtacctactatgttctagggctccttctaggcacttcttcaacatattgaagacaagttgttttcgatgactcattgtgatcattatgaacttaagcttccaaaggtcattgacactgggagctctcaggaccttgaagggaaattttctccctagcccccagccttttgcaaggacttcatatatctttgtctaagaggatatttttcttccttcttttttcaaagatacatagtaggcatttaagattgttgtataagtgactgaataaataaattgctcttgcagttaaattacttaaacttgtattttacacaagtttctactttctctgtaaatttgaaggtgttaagaaataagtaaaattgagtgtgtggcttgtcatggtggctcccgcctgtaatcccagaactttggtaggccgaggtgggcggatcacttgaagtcaggagtttgagacgagcctgggcaacaaggtgaaaccctgtctctaccaaaaaatacaaaaattagctgggcatggtgatgtgtgcctgtagtaccagatactcgggaggctgaggcatgagaatctcttgaacgtgggtggtggaggtttcagtgagcccagatagtgcctgggctccaacctgggcaacagagcaagactctgtcctttatctccaaaaaaaaaaaaaaaaaaacattgagtctatcaggagtggagttgataaaaatgctttggagactatgggttatctttgaaagattgtctttgctgctctgtaatggtaacgaagaaacactatacttcagtttaatgatccataagaaataactgtcattgtgtattattagaatataatgtaataaaataaatttcatcagtgtcttctagattcaatgactattcaatgattttcatacctgaacatgtcaaagtatttggctgcaacttagcggagttgattagtagcctttaagaagctatcaaaatgaaagcagttaaatgaatcagtggtaaaggtccttgaccctgatatagccattgtctaatctcataatttgggcattcagggacatatcgggggaatccagttgttacagaagaaaccgaaacataattgaaagtgacaaatgatcaactggagattgggaaaacatgaaatagaaaaccatttgcttcaggagctgcctaaaatataagatacacacagagttcttgattttaaatcaaactttaaaatcactggtagaaaaggcagttgaaaattatgagaattcaaaaatttacttataatgcacttaccaattattatttcttccattttgtcatggttatccttgtattatctgaaacgagttgttaagaaccaattatgggaccaagaatttaatacttcatgaaactttataatcaaagaatagactacaaagtattccttctgtctttgcaaaccatacaaaatgataatagaacagtatcatctttaggatcaaagacccaaataggcattggtgtgtcatttagttgcatatgtcttaaatcaaattttaaaacaaatttaggcatcatctctcaaaatctttgcttctgtatattaatcccattgttttggaaaaaatgtatattttttacaaatcatactctgtttactggtggctcaaaaactttttagcttacatagtagttgaaaagagaatcattttttctgcagatttttgctcatctgtgtgtaatttaaaactgaaacatattaattttcttaggttttcttagtgaaatgttacatgcaaatgatgtataattatcttgtaactatccatgcagttacattttatttgctctcaatttttaatacattagtaataaatgtacactgtggaaaaaataaagttataaactttatctgtaaacctaccacccaccggtaaccccagccaataatcttagtttatatactttcaggcattatattattgttattattagtaaacctgtctcatctgtctctatcttcttaaaattgcatatttatatctatagataagtccacctttatctagaatagaggattatactctgtatattatttttaacttgattttcaattcaagctgtattatgaatatatttctctatttatatttataaatgttagcctttttttttttaggaattggaacatcttaaaccactctcttgcttttgggcatttaatttgtttccttctcttcagtattatcaacaccccattattaaaacagaaaatctttatcaagcagctttaaaaacatattctcggacaggcacggtggctcacgcctgtaaacctagcactttgggaggccgaggcgggtggatcacgaggtcaggagatggagaccatcctggctaacatggtgaaaccccgtctctactaaaaatacaaaacaaattagccgggcgtggtggcaggtgcctgtagttccagctactcgggaggttgaggcaggagaatggtgtgaacctgggaggtggagcttgcagtgagccaagattgcgccactgcactccagcctgggcgacagagtgagactccgtctcaaaaaaaaaaaaaaagtattctcctaaattctcagtggaatttctgggtcctgtggaatgtatacatatgttgctcctcctaaaaggagtggataaactcctctcctacaagcagtgttctgcactggccctttctacaaattcctttcaccctggtattatcataatctaaaaaataataatttgagaatcaaaaaataacagctatgcttgttttcttcaggaaaacagaacaggttatccatatatctgcagggtttttttctccacaaaagaaaggccagccattttcaataacaagtagtttggcaggaccagaaccattccattgggtcactggtaaaatttgtctttggctttaaacattaaggcagccaggactgtgtctttggacattgatacagcatttagtccagtcttatttacaattaggctttttgataatggcttttgggctgacgttaagtataaaatctgaaattagattttttaaagattataatcaaaaagcaaaaatgtcttcctagaaatagcaaaggaatgcttttgctggatttgctccactaactcatgtaggcaatataccaaactcaaacagccagcagttgttttgtaaaagacaaactgcatctgaaatcagtatgacaggaccacagtttccatctcatcacttccaccaacttacatttaagaaagcacaacttgaataataaaaaccaccatagagtaaacaaattcttcaatgagaatgctttgaagtcaagagaaaaataggctcagggcattgtgttacagcaaaattttgcctttggcaaaagttttacgatggaatagggtttttaaaatattgggaatcaggtaaattgcatggctaattgaactggggaagacagcttaatgagctcatttctctccttcaaatccaagaagtcagaaggcaagttttcatctattctttcatttatccaattagaacatatcgtccccacacatagggctactagaagaagtaatagttatgtctgatggctcttaggaagtattgtcaatagataggacctcctctgtagttataactacagatgatcaaattaaccagaaataaattttggtcataaatttcttcttgctccactctgtaggctacctcctccaaagcagatcgtagaccagtgcatttataaatcacagaatcaccttttaatggttatagactatatatagcatagtgacagtcatatactgctggtgctggtcaaacttgagatcaacaattctgttggatttttacccctctcttccttctttttcctcctcttccatattctgactttcaggtttgagcatgtaataacttccaggatttgttttgggcattatttatatattaccacttatcctaagattattttgagtcagataaaagtaagacattctattaagttatcttcattttgaagatgaagaaactaagattcatagaagtaaagaggactctaggagtaactaactgtccattgtcattgttaatgttacttaacctctttaatcctctgtcgtgaatccaataacgatcaaagtagtaggcaagtttgctgagggccaactgtgtgacaagcactttgataactgattggtctttacagcaaccttatgagagaagtattattactctcatattatgagtgagaaaaataaggattaaagaggtacaggcaattactcaagaacacagggctagcaaatcaagaaacagaagttagatgtgagatattgtatcacccaggcctaaaagatgcaatgaaacaacccattttaaatgtttaatatagtaaccagagtatactctcatttgatgagagtatactcatcaaatgagagtatgcatttgatgttacttttcacagtggcctttttgcagttaggaaacagcagcaccaataatagaactaagctgtctgactcccagcctgtacctaaatctctaacttttgattttatgaaataaatttgatttgcagatgggcattgctggtgagggaaatgtaaagaggtcaatttccccactttaaatttttttggctaaagacccatagctgacaatattttaatggttgccacatattcttcttttatgaagtgagtttcattttatatttgtaagtggtttttattgcaaatcatcacctaacagtcaattctgaagactttccataaatgtcaccttgtttgtgaattgttctcattctgtctcctctctaaattccctcaagaacaactttctttggacattaatatcattattaattgtgaattgtcagctaacagcttagcaattgtctatcatgctcctaatgcatggatgatacagagaatataaagtcaataacttgtatttcctgaaagatacatatacagaagccaatcatttcagtagagtgacaggagcaagattgaggtattaatagagtactctgagagatgagaagcgggacaactaccttagcctaaaggtttgcaaatgattgtggggaaaaataatctttatcactccaaaaagaatattacagtgatattttaattgaccatagagtttaacttgaccattgtaaaatgaccaaaagggtgaattattttttaccaattattaaaaagtagcactacctgatataaacagtgtgacctaatgtttacattcttattattttttctcctttttgtctttttctctctccccagctaagtagaaaaaactcactttgttttcatgctaaaattttggaataccattaaacagcaacacactggacaactacattcttatgttttatcttctccctttaagattgttaaaggaagaaattgaactagtggggaaaagtaaatactggccaaaaaaaaatgcttttgactagtgtatgttccaatgatgattatgaaatatgtcaaactgttctaaaatactaaatatgtgttactatttattctgtattaaaatagaacaatagaataacctttgttgtcccaatatgaaaatagtttttaacaatgttaatataaaacaaagagcaaaggaccattatcttggataaacagagagacattactttacatggtttgactcccctgattcataatttaacatgtaactctggcatatgctgggcacttagggaagtcacattaagtatttcacagcaaatggagagtgagaaaaatgattttcagaaatcctggtatttacttattataaatcttgtcttgaatttattgtactttacatgaaatataatttgataaaatgtaattggtttcagtgtgtatgcaaaatgagaattttctgatcattcagatatcaaaattaactttataaatacaaatacatataattacctattaaaattctaaggtgtatttattttaataaaagtctttatcaaacctagataaatctcatttatgattataaatgtaaaactcctaaatttttttttacttggctttatttactattaatgatgttgggtttattaaaaaatgcaagcacagactccaattagcctactaacctattgtataatttatcaattcaataggtcaaacaattaaatcagaacatttaataaaattgacaatatttttttatttttttacaaaaatccatattggttgttttgaagtagcaatttcttcttcaaaatgataaaaattgtctatgtaaaatcaatagtcaatactataaaagctgcaacattatagacattttcattaaaatgagtaaaaagataattatgcctatcacactactataccatataaattaactattatgctgaaaattctggccaataaagtaggggaaggaaataaatataactgtatatttaaaattatgaactaaatcttcactgttttacaggcaaaggaaaattctaatatctgataaaatctttaaagtcaattaaaaaagagtatactaaagaaaaatgaataattttctcaaaaaggactatatctaaccaagaactaggtgaagattggcattactagtatccaaagacataaatactaaaacagtaattgacatattatctaaaatcaaaatagtgaagatataacaattatgggcagaacacaagaaaatggacattctcagatattgctggtgtgagtatgagtttaatttttctagaaggaatttgaccatatttaacaaaatctttaaaatgtttatactctttgataatgtaatttcatctcataattttcttaaggtaatacttagatatatatccactcccgatccccaaaataaaatggaaaaaaaaaaactaaatgtgtaatgattgcagaagggttgaatgttattttatgagaaatataagaaataatgcagcaaaatacatgatgtttaattatacaaaactatgtagtaatacaaaatatatgatttttaataacacaatacccatgtatattcataattttgaaaagaagaaatatatgcatatacaaatttgaaagaaattatctcatgttgacattttgacttatcatttgctagtcaaattaccagtgcttttaattttctacctcctgcctttgttttataaagaatatttttattatgtctatagttatactaaactcagttcagttgaattgttatttaaatctatggaaaaaattttgctttgtccataaattgtatttatattagaaagttaaaataattaattataaaacatatatccaggtttttttatttgttccagtacataacagacctattacataatttgagtaaattttgtcttacagttatacaggcagttctctccttacacaattctgatatgcatgaatatcagttatcatagtttagttaaatgctaacagtcctccaacaacgtaactcaagtgttgggtaacattgaatattactgtgagtaattacataaacaaacattgctgctggctctgcagtccacaaattaccacataaaataacagatgcacattgtgatcagtgaccgatcacgtttatttttttcagtatctgttggtgattgcgcactacacatttatcattcagtttatttatagaagagaagcgtgtggttgtgttgcctccttgtgagtgataaacccgagtgacactttacaaacacagatattcaaaaaagaagaggaattggacagcaaagaggaaagcactgcaaagaaagaaaatacttgaagtaaaattcagattgaacctaagtggagtcatagaagaaatagtcactactgaggtttgagagattctgaatacgtagccagagctacttagtgaaggtgaacttaacataagtgagggaagtgcttgccacaaatagggtgaagatgtcctggaggaagtgacacccaaacacttcacattagaggaattctcacaggtacttcacaacactaaaagcataaaagttaaaatgttggaagctgattcaaacttagaaaggagcgtgacaattcaccaaggcatagaaaagaagtggccgggtgcggtggctcacgcctgtaatcccagcactttgggcggccgaggtgggcagaacacgaggtcaggagatcgagaccatgctggctaacagggtgaaaccccgtctctactaaaaatacaaaaaattagccaagcgtggtggcgggcgcctgtagtctcagctacttgggaggctgaggcgggagaatcgcttgaacccgtgaggcggagcttgcagtgggcagagatcatgccactgcactccagcctggggaacagagtgagactccatctcaaaaaaaaaaaaaaaaaaaaagatgcttgtgttcagtgtgataagttataggtgagatgaaggcaagcactgttcaaagtacttttagtgagtattttacaaaggactaaaacaacttctccaagtttttaatgttttaaattacagagtactaaataaatggtcatttttactggtttatttctttacatttataaccagcattggagagttgttaacatgttgaagttttacaaagtcttagagctatcataacctttcctgttgattattaagatcactttgcatgtttgtaacacaaaggttaaacacttgaggggatagatgtcgcattttccaagatgtgatgattacacgttgtatctctttttcaaaacatcccatgtagcctataaatacatacacctactacgtacccacaaaaattaaaaattaagaaaaaaaaagatcattttccatggttcaagtttgcatggtcacttttacaattccaccctaccatgcccgtaaatatgctatttctgacttacgaaatatttttcaaataaaatcattgctgacttttaactcactgatatgtgctttacttctggtgaaaggcctaacatatcaataaaatgaaagaaaatcacagctttattttctttactgttctgatattttttgttctagtgtgatcgctgcttgcctctttataatgacaagcctttccgccaaggtgatcaagtttacgctttcaattgtaaaccttgtcaatgcaacagccattccaaaagctgccattacaacatctctgtagacccatttccttttgagcacttcagagggggaggaggagtttgtgatgattgtgagcataacactacaggtaagtagcaaataaattcctgagttggtttggaggcctgtgtgcttctatctacaatgcatattattttaaattatgttattgctatcttatttaaggatgtactttcatacctttaagtttgaaaatcaaagctagttcaccaaatcttcctatttccaaatcactaggtagttttcagaaatagcactctagtcttaaactatatcttttcaggaaaaggattttgttgttgttgttttgttttgttttgttttttaaagagttcacaccatttgactaaaccacaaccatatttagaataactcgggaatgcttactttgaacacatatccttaaagtaagtttccttttgtcccctttattgtcctttatgtctggattctcatgtggagatggcattcattcagatttggcatggacactggtagtctgagaatactctttttgaaaatactaattaaatggagacgatgataatcaaagtcctgttctaaaactacaaagcctttgactagtcattgaaaaataccatccttattttgaaaggcaagaaatggccaacatctgaatttgtgaaatataatagcatatatctgatgggtttcaaagtggtactcttaagcatgaatccatttatcggctgattattgataacttaaatatcacaagatcttgggtaggtgctggggacatgaagatgaataagacaatgaattttctgtctttgggttattgtacagtgggaaagacagactattgaaaggaatgattacaaagttgtctgatgattgctaagatagggcaaggacagtaggagttaaccagttgaaagattaggatggtgaactaaggcttacaattagggaaacattttgtgcagtggcctagaggagggagaaaaatgacacgtttgaaaaaccataagatgggcaaatggctggtggtaagagatattaggaaggaaggcaggacaatatcatagaggactctggagccatgataaagcctttggcttttatctaaggtcaaggagatgacacttaagggttttatatgggaaaggggcataatgagttacttgttattaaaagatacacctggttataaagtaaaaaatggattggagaaggttagagtggttggggaaaactagttagtgaggtgctgcaatagtccaggtgagaaataatgtcagaatacatttcagatggtacggatagagagaaatggatccaagagatatttaggataaaaaagtgagtgttttgtgagcagagtgtaggcaagggaaggaaggagagccaagactgatacctaacattacattctagcttgagcagtaggctcaacattggtgccagccattgagatagaaaatacaggaggattgagatgagggaggagatggcaagttctgttgtggatatgttcactcggtttctaagagacataggagaaactcctgggggcagttggaaacacagttctgaagctctttccttcaaggaaatcctctcatgatgctttagagaagatcagaatcacttacacatgttagtgacaactatgcttatcatggtttataaatgtgtattactcctggtattatttagttcagattcctcttacctcctagactgtaagagagctttgtgaaagagatgcaatgggtattgtgtatttagtttactactgtattacacagcacttagcacagtatttggtacatagtaatcacgcgataaatattcattaattcataaataaaagagagatttctggattggagatatggatttgggagtcaacagcatatgtaaatggaaatagtctagaaatattataaatcaatttaatttttaactagctcaatagccaatatctatcagaatatgagttttcatattattgattattgattatttctgtagtcttcaaatattggagaaatttcaatattttttgagcaaagtacatcatgtttaaagggggaattgatagtcttgagttctacttcagcttatttcaattatcttatacactagtcacgttcactttaaaaattccttgtagtttaggttttttattacataatatagcaaaggaaatttgtaattataaattataaactatgggaattacctgatatatctaatatgtcaggctattctagtatttagtatgaaaagtacttggtatctctaaatataatgaatttctatttcaatctttgaaatgaaaaataatggccactaacataatcatttgtttttaattgtgttaactacagaataataaattatattaagagaagtctcccattttacatgattgagttctagaaaaatatttccaatactacatacctgcttgcttcttactgtataagtatcatctaccacatatgtagaaatttctcctgctgtattgagtttagataaagtgcctggccccagatataaagttttaagtttaggagcaaactctttccaaatgtatgggcccctataaagcacagctttttagaagtgtggtattatataacagatgggagtttaatgaagtaaagcacagtttgtaacaggttcattgtttcatatgctctggatcactaaattggcaggtagagatgaaaggtgcattaaaacggacgttccgaaaattatagaattccctcaaaggaatacagtctttaattttgaattatgcagctgattttaatgaattagaagtcataatgcataacctttccctgatgcaggaaggaactgtgagctgtgcaaggattactttttccgacaagttggtgcagatccttcggccatagatgtttgcaaaccctgtgactgtgatacagttggcactagaaatggtagcattctttgtgatcaggtgagtttttctgagtatttaaggtaaaggattactctgtctgccagaaacttatttggatgttattccactagtagaattgaagactgcatttgccaggaaatcctctatgtgcatttgcatttcaaagagatggttgttcgtgtgcaactttgagtatggacatgaaatatagcactagttcggtggtcctttgcatataaaaaggcttattttagttttaattttacaaatgtcaaaaaatcgaagggtaggggttctaagtaaattggggtatatgtcttggaattattggtgaattaatattaatacatgatataaataaacaagaatagtttctccaaaaattccatagaagatcatatagcaaaagtcacttacacttagggccaaatggaaattatgatagcctcgcttctcaatttcttagtctaactttccctcttaaaagtacaatggattttttataattttaaaactttctgtttacttacatcacaaatatcgatgtctagcctacatgcacacagattctaactaacctcagttcatgtatcctacctcaagcaggaaaacaggcttcttattgaagctgaagtttttcctgttctgataatactaataagtgaaaattgtgaaaatcggtaaaggagaaatttactttgaagaatcaattcaatgattgtattaattttaaacagttatatactctgttatgaataaataaggctaggagcataaaccacaatccagttatagaatatttgttaaaaagttatattgtgaacataatacacacaagacaaaatatctttctcctataattttgagaattcattaaaaattgctttcccaaataaaagacaaatataaaccaagacaaaatatggattcaaagaccttcagagtaaccatcatgtgtcaataagggggcattacatgcttcattagaaagctgaagagtagaaaaattattaataaagacaatttctactatttttattttataatattgagggactattttctcagaaagtcatactacagttttccatatattaattagtaaactctgactgtatctttagattatatttcatttttacacatccaccctgagttttcagcatggctatcttttgcttatcattcaaatattgatatatcatattttgagatatctttgctgaccacccaattacaaaacattctcaagtctttcatatcaccatgttactctcattacaggctctgtaaaattaatttatttgtttacttttcttcttctctctttccaacataaacagaacagtttcgatcatataaaaagcccccaataagtatttgtcacataaatgttgaatgaataaagagagattatctgagcactgatcttatagttagattgttattttaaacggtcattacaataatctgagcattatgtaaattttcacttgcagaacagtttttctccctgaaaatctaaggtcaagagctttgttatatagtataggaagactgtaaactatagttttacctcccagaatctcagttacgtgtctaacctacacgagttacagtgcatcagatttgtctctccatttcaccattcagatctacaagaaattgaaacctgatttttctgaactcaaacttctatttcaagtccgttttatagggatgctagacaaccttgggtggttctgtgcttgtaaataattaacaactgactaagaaaaaaaaaaggccaccataatcaatttcaatctaccagtgagatgtcactgaacatggatttcagaagaaatgtacttaatctgctcttatgagccagtgcagtgtactccagcatactactggctctagatttctttcttaacatcttataaagtggagctaattattggatggaattatgaaagactgtaccatttataagcaggatattagctgtagatagtgttattttttaagttggagaaatttttctctattcctagtttttctgagagtggtttttatgaatggtgttgaattttgtcagctgctatttctgcatcaattattatgatcatgtgatctttttttctttagtttgttagtgaagtagaatacattggttgcctttcaaatgttgaaccagcattgcatccctggaataaaaccacctttgtgtgtgtctttgtgtgtaattcttttcatatattgttaaattttatttgctaaaattttgctaaggattttacatctgtattcataagaaatattgctctatggttttgtttttataaattgtgtttgtttcattttgttattaggataatactctcgtaaaatgaattataaaatcttccttcctgttgtttttctataagaaatgcagaactggtgttaattactctttaaagtttaccccattctaatacatagtattctagtaaatacagtaccccatgtattagtccatttttgtactgctgggaagaaatacccaagacagagtaagttgtaaagaaaaataggtttttatttatttatttatttatttatttagagacagagtctcgctctgtcacccaggctggagtgcagtggctcaatcttggctcactgccacctccacctctggggttcaagctattctcctgcctcggcctcctgaacagctaggattgcagatgctcaccaccatgcctggctaatttttttcttttttttgtatttttagtagagacagagtttcaccatgttggctagactggtgtcaaatcccacccacctcagcctcccaaagtgctaggattacaggcatgagccaccacacctggccagaagaatagatttaatggacttacaattctacgtggctgggaaggcctcacaatcatggctgaaagcaaaggagaagcaaaggcatgtcttacatggcagcaggcaagagagaagtgccgagtgaggaacagggaaagccccttttgaaaccatcagatttcatgagaactaattcactatcattagaacagaatgggggaaactgcccccatgattcaattatctccacctggttcctcccacaacacatggggattatgggaactacaattcaagatgagatttgggttgggacacagccaaactcacacttggcccctcccaaatctcatgttctcaccattcaaaacaaaatcatgcccttccaagagtcccccacagtgttaactcattccagcattaactcaaaagttcaagtccaaagtctcatctgaggcaaggcatgtcccttctgcctacaagcctgtaaaagcaaaagcaagttagttacttcctagatacaatagcggtacaggcaatgggtaactacacacattccaaataggagaaattggccaaagcaaagggcctacagtccccatgcaagtctgaaacccaatggggcagtcattaaacctcaaagttaccaaatgatctcctttgactccatatcttacatccagggcatgctgatgcaagaggtagctcccacagccttgggcagctcggcccctgtggctttgctgggtacagccctccttctggctcctttcacaggctggcattgagtgtctgtggcttttccaggcacacgatgcaaggtgttggtggatctaccattctgaggtctggaggatggtggcccccttctcacagattcaccaggcagtaccccagtggggactctgtgtggggggtctgaccccacatttcccttccacactaccttagcagaggtacttcattcattagggctctgcccctgcagcacatcctctgcctggacatccaggcatttccatacatcctctgaaagctaggcggaagttcccaaacctcaattcttgtcttctgcacacctgcaggcccaacaccatgtggaagctgccaaggcttggagctgccattctctgatgcaatagtctgagctgtatgttgatcccttttagccatagctggagcagttgggacacggcaccaagtccctagactgcacacagtgggggggccctgggcccatgggaccattttttcctcctaggcctccaggcctgtgatgggaggggtgatgagacatgtcctggagacactttcccccattgtcttggtgattaacatttggcttcttgttagttatgcaaatttctgcagccaacttgaatttctctccggaaaatgtgttttgcttttctactgcattgtcagcctgcaaatttttcaaacttttatgctctgcttcctctttaacacttactacttagacatttcttccactagataccctaaatcatctctttcaagttcaaagctctgcagatctccaggggaggggcaaaatgccaccagcctctttgcatagcaagaatgacctttactccagttccccacaagttacttatctccagctgagaccacctcagcctggcctttattgtccatatcactatcagcattttggtcaaagccattcaacaagtctccaggaagttccaaactttcccacatctttctgtcttctgagccctccaatctctttcaaactttcccacattttcctaccttcttctgagccctcccaactgttccagcctctgcctgttacccagtcccaaagttgcttccacttttttgggtgtctttacagcagcgccccactacccagtactgatttattgtattagtccattctcactcaactataagaacaaacctgagactgggtaatttataaaggaaggatgttaattgacttatagttcctcagggcgggggaggcctcagtaaacttacaatcatggcagaaggggaaacaaacacatccttcttcacatggtgacagcaaggagaagtgccaagtgagggtgggggaaagttccttataaaaccatcagatcatgtgagaactcactatcagaagaataggatgggagaaactgcccctcatgattcaattatctccacctggttcctcccatgacatggggattatgggaactacaattcaagatgagatttgggtggggacacagcgaacacatattgctccagtaaaactatctcagatttctttggaaacagaaataatttattattaattcaaaattaaatactacatatatatgtacatatatgtgtgtatatatgtatatatatagagagagaaagacagagagagagatacaaggaaatgagagtcatattaacatcattaggaatttaatattactagaagacagttcagaataaccttaaaatcccaaaagaagacattttgaagaaaaacttgatactcagttctatccaagctatggcaccaacatgaggttaagattctttttgtacgagagatggtcaaaacattaccattcataaccccatattaaaatattcaatatgcaaagtgaaaaaggaatgtaagactggggacaacattaaacaaaggaaatgacaaacaattatgatccaaagaaataaatacataagtcaaaaaatattttcaaagtatccattggtctttatggtctgcaaggatagtttccttacatacatgtttagtaattcaattttatttaagatcaaatcacaattttttgtgatttgagataaacaaataacaagtagagggctaaaaatactatatccaaatatttcagtgagaaactggatgcttttttcctaagatcaaaagcaagataacaatatcccataacattgtactgaaagttgtagccaagaaaatgaaataaaagacattgagactggaaaaagagaagttatttgtatttgcatatgccattatcttatagatagaaaatcctaaggaattaattcaaaagtattaaaactaataaattcaggctgggcgcggtggctcatgcctgtaatcccagcactttgggaagccgaggcgggtggatcacgaggtcagcagatggagaccatcctggctaacatggtgaaaccccatctctattacaaatacaaaaacaaaattagctgggcatggtggtgggtgcctgtagtcccagctactggggaggctgaggtgggagaatggtgtgaacctgggaggtggagcttgcagtgagctgagatcatgccactgcactccagcctgggcgacagaacgagactacatctaacaacaacaacagaaaaaaacctaataaattcagcaaggttgcagagtacaatatcaatacacaaagatcaattatatttccatatatttgcactgaacaatctgaaaataaaattaagaaaacgtcttttaaaaatcaccaaaagattaaaatatttagaaaaacatttagtaaaagaagtgtaaaattatattctgaaaaccataaaacattgctgaaataaagaagaactaaataaatagaatgacacccaatgctcatgtatcagaagacttaatattattaaattaacaacactctccaattgatctacagatttagtgtaatctttgttaaatgcccaccttacttctttgcagacattgaccatatgatcctaaagtttgtatgaaattcatgggactcaaaaatgtccaagataaccttataaaaaaagagttggaaaactcacccttcccaatttcaaaatttactataatcaagacagcatggtactgggataaagatagacatagagacatattcactgaaatagaattgagaatttacaaataagccctcatatttatagtcaattgatttttgacaacagtgccaagacagttcagtggagaaagtgtagtcgttttaacaaatggtcctgggacaattgtgtttttatatgcaaaagaatgaacttggactcctaccccacctcacatataaacaaattaattcaaattaaacaaaatattgaatataaaagctaaaattataaaatcttgagaagaaaatgtagatgcaaatcttcatgtcctcggattagccagtggctttttagatatgacaccaaacgcctaagaaacagaagataaaatgtgtaagttggacttcattagaattaatatttcaaagcacaccaacaagaaagtgaaataaacaacccaaagaattagttgcaaagtatataataaatctgtaataatgaagaaaatatttgcacagcatatatctgataagaagcttgtctagtatatatgaagaacttgaagtgaataatcaaaagacaaataactcaattttaaaatgcgcaaataatctgaatagatatttctctaaggaagatataaaattaccagcaagcacataaaaagatttttgacattagtcatcagggaaatgcaaatcaaaactactgtgcaagcccacttcccaaccagtgggatgactgcaactcaaaaaaaaaaaaaaaaaaaaaacagacaaaaacaaaatttggtgaggatgtggagaaattggagtcttctcataggctgcctgtgagaatgtaaaatgtgcaccgactttggaaaatggcttagtgtttctcaaaatattaaagatggaattaccatataacccagaagtttcactcctctgtatgtatcatatatcctcataaaatcttattggtgaatgtcaatgccacattgtttgtaatagtcagaatgtccatcaactgctgaatgaatagataaaatgtagtataatcacacaatggaatattattttacattaaaaagaaagaaattactggtacctgctacaaaatgtgctcaagtctcagaaattagagtagggaaaggaagacggacgaagaatagagaaagcttgttttgttttgtttccaagtgcaaaaatctgttttaaaaatatatggaaggaaagacatgctttaaaatgttaacttttttggttttaaaaacatttttccttttatataaacttttttctctttccaaatctgctttatttataacttttatagtcagaaaaaaaggagaattttcattcaacctgatatatagccagagagaattacacataagaataggaatgtaaataagaatgatagaactgttttctgactttaaacccccacattgtttatctttaaatcacattcatatattatcttaatttttattattttctcatgctccaagtatagagacaaagtttatggagtatcgttacatgtggagatattgtgtcaagtctaccttacctaaataatgttataaaagatttcaaaaaatgtttccagacattgtcaataggataacagaacacacacttaaaaagttgtcaacagtgtcagaattataaactgcaaaattgaattcaaggacatttaaaaaattcatgcaatttcaatccttaataatattagggagcacacaaggaaattaggcagtagttcaagtctcattttgttataataacttaggaatgaagccagccccaaatggcctgagtgactgtgtcgtgcgctctatgttctggaagggaactttccctttggcacttgtcatttgaaactcaatccaatctcataagatatggcatgtttgccttattcttccataagaaatgttgtaattcttccttatgtgaatgccaaaatcttgagaggggcataaagtaatgctctgagtcactgaatcctaaaaatactgatgccacagtcaagacagagagaacatctaaagcacagtactaatattaataggagagaggaaaatgaagagtaataatgattattgaggaataactaacatggaatccttggatcccttgggttactatatgagtgtatattttatgtctgtataaattgagtaggatacaatttatgtctgtgtcatacaactgtaagtctgtgtatttttccttttttttttcttttgtctgtatttttgagggtgagagctttcagtactttcatcagatccaaaagggatacatgaaccaaaaaagatgataattatttcaccatggaaaagaagtctatcttatgaacaggctgggttattagttcaggtacatattatgtgagtttttcaggataccactgcacttccttcttgtttgcttgaacttaatgcatgaattacttgacatgcatcctgagttggaggttaactgtccttttccatttcctcatctagtgtgacttaagttcagatcaatcaaatagagtcccaggcctagatgatgcctcttctgtactttgacatatctggagaagggtctgtgaatccacacctaaagtgcatacatctagagatctcagtctgatcctgacccaaggtgggagtgagccgcttgtctccatcctttccctccactgaccccactcctccacatattttctggtagccccagagtccctgctatagccacctccacaggtgatggtgataaggtagggagaccggtgaaagtccctaacataagtccctagcatatggcctgactcatgtagaatgcattcaagaaatattgtctgagtgctttcttgcttgggacttttttcatccctgctaccttctctcccgtttactttgcttgttattgggttgagctgaggaagccatgggggttcagccactgtagtcaagatggtggtcatcagctagggtagtcctcaaacttttaatgcacatgtgactatcctaggtatctttttaaaagacagattctcattcaggaagtttggggttggggctcagattttacatgtgtaaaagttcccagatgatacaattgccgcctgtctgtgaaccactttttgataaccaaggagttagaacactgtatatcaaagatatgtagaccaaagaagctgaatgtagatgggggtaggggagttgtgagtgtgtactcacgagcacatgtatactcttggtcagttgtgggtttactttgctccatcctctgaatcccatcttaaaagcaaggattttccaagtcatccaaattaagttaggcttgaattgtgccctgggctctacctttaaaattagagtatatcacctaatagccatttttaaaaggaaataaaaacaacaaataagggaattaaaaagttgtgtgaaaaccaaaaatatagttgtaattatataaaaagagagaatagcagattgtaatgctcaataaagcatcaataggttactgtaatagcaacagaacagaaataaatgattaagagatatttaaaaatagattaataagaaaggaaactgaggttgaaatgaattagacgaaatggaaaggcatcagtgaaagaagcatttctaggtctgacctatggaagatggaataataaggaacagagaccctactcatgaaaattgattgttctggtgaagtgataattttcaaaacaatacatttaaaatttgaacagaatatactttctctgcataatgtaccatttttctgcagttcattaatggtttctcttctgttcagaattaggtatttgtcattaattaccataacatgtccaaaagtcatcaggtgaacttccctgaagtatattcttatattttgtatgactcaaatattaaagtgtacaaatagaaaaaataagtattgcataagtttccttagcttatgagaaacctgaccatgaatagtatgatccatggatattggatgtatacattgaggtggtgaaggatgtgaaaagaggagagttttcccagagcttcaatagagacagaaaggtcttggcacaagccacgtggtctctccttcagagaattagggaagtttagtagtaatatttctcatagagctggtaaattgagtaatatctcattattctgagattgtagaggatgagattcacaaagacaggaacaaaggtcctggggtataaatgggaaaagaagggaaaaattaatcttagctggataggaaggttagtattgagggagttatccaagaatcaaggttgtgacaaactgcctgaaagtaaaaatagatggagttgtaactgagatgaggtcttagcctccagtttatgttgagttccacatgtttgaatacatctgacatctttttgggaacaagctcatcacaagggcccaggtatacaaaattggccaaataccaatacctcaggcatttaaggctagattcaatagccctaaatagccataatagcactagcagaagcattaggtagtgtctggatattggaagaactgatttaactagtaagtgcaagataatgtgatacaaggcccattgccttgctaccaatagcaatgtagttagaataggctaaacagatgtaacaaacccccaaatatctagtggccaaaacaatatacaggctcatttgttgctcatataacctctccaagacagctgttcctacctccttgttggatcttctctttgtgacaattcagggacacatgctccttccattgcctggatatgcctttaactagggaaggaaaagacaatgtggaaaacaacttccacttttaaaatgctttggtccaaaagaggtgtgtgtcgcttctgctatcattgccattgatgatagctagtcacattgctaactagttatatagaaggctgaagacatgtagtctctagctgggtaaccactttgcagctacatttgtgtactattgaagactagggagaatgagtcttgatggggagcatgtcatctctgcttaatactcatgcaacagaaggtagcccaagagcgaaaggggcattctcttcttttctacacacagaacaggataacttctgtttaatgaggacctctgagaatagagtaccccatgagcatctcaggggtgccaagccattaatattggtgggactacctgcttggaggtggaccctgtaatattggtagatgcacctgtgaaagcacatatcatagcagcatgtatcagcaagagagaattggacataggaggagaaacagcttgtgtgcaaggttaaaagatttgttcatgagcacatgtgagagagaagccccaggaacaaggaaatgagaaaacaattactgcctcctacatgttcccagaggagggggctgggagagcaattaagcataaagagcattaattgcatagaagatgctgagggatcatagatttgaaagcaatttcaaaatatgagtattttaagacttttagcaagaacagacaccataggctgtatatagtttcctggagttatgattaaaggatgaaaacaacttttgtttagatatgtaggtaggtaagtaggtagatatagatagatatgagaatagtaagtttgtttaaacaaattattcattacatcatagtgacccttagtgctttttgatgatactgactgatatggtttggctgtgtccctacccaaatctcatctaatagctcccataattcccacgtgttgtgggagcaacctggtgggagatgattgaatcatgggggcaggtctttcctgtgctgttcttgtgataatgaatgagtctcatgagatctgatggttttaaaaatgggagtttacctgcacaagctttctctgcctgctgccatccatgtaagaggtgacttgctcctccttgccttctgccatgattgtgaggcctccccagccatatggaactgtaagtccaacaaacccccttcttttgtaaattgcccagtctcaggtatgtctttatcaccagcgtgaaaacagacgagtacactggcttattgaggaacagaatataatcagcctccttcattcctcactcactaaaccaatgtgctgatcatttctagaggcaaggacactccaagaatcaagaaagagccgatgatgaggctttctattattctcctggactggacgttgtctcagcttctgctgggccatagaaccctgcctctaccttgacttacccacatgttgttttggtgccaagtattgagtgctgcattttggggtgtacaagacagattggcatattgctaaaaatgtgcgaggacagaaatgacagaaactagtctgtaagattctcataggttccacttgtcttgcactcgtcatgtacaaaaatatgccaagcattgtagttcattaattcagtccttaccaaagctggtaaagcagttattaatttatccactgtaaagttgaggacatccagccttttggaaattaaataactcctccaatatcacacaagtaataaggaggttgtgcagaaattgaaaacttgtgaatttccaaagctcatgcccagctggaggttagagacatagggttcctaccaaaaatgtgttcctagcactcagcatagtgttcagcacttaagaggaaacctacagcagattgctaaactgggtatttacttacactatccaaaagtaggaaggaaacatacccatttgtttgtgaattattgtatcaaatcctattaatttcatcctaaatattaaataaaattcctaaataggaaatagcaatgttcatataaagaagcagcaaattaatttattggaatcgacacattcctcaaatggagatttggttgatattagagacttaatgtacctcccttagtgcttaatgtataacagagattccacttatcttacctatataacctaagaaatttgaatattttataaagttactttttagaaaacctgatttatttgttttccttgtcatctcagatggataccttcctctcaaaatctatttggaatttatattttcaagtattcaattaactaacatattaagcaggcattctcctgtgtaagttcctagcaacttttaccacttgtactaaaataaaacagatagttaagccaaatgagttaacttttctgaaagtgtatctttatacaacattaactatagacatggaaaatacatttattcacgttagaaataaatgcttctgtgagatctttcattttgataaagtcaaaacaccatcttattaataactactatattaattttgcagcaaattacaataagaccacactgtatagttgtgccattcagatgacatttatgaaatgctctaatttaacatggtgacatatattacctgcatcttttacacattatagcttatatcctctgagcgaaatagacctaaaccatccaaaaaaaaagagagagagagagagaataatgcaatgggaaattatacccctttgagaactagaaggactataattacattgcttcctcttaaaaccattcaaatatgtaaccattgctgggaacagcagtatgtggggaacctctttacactctttctgtcttgaacactcaaaagattgagaaaaaaatattcctttcctactatagttttatttgagcatgcttcagaattttacctttttgcacactccttagagattatcgtggggaagtttagaaagcagtttcttggaaatgccttttggaggggaagaggagctataaaaatataccagcctgacaaatgacaggcattgtagactggaaaagaaaagacatcttggttttacaccaatgtagaagcttttctttgcaaatgagtatttttgacagctgagcaagatgataaacagaagtatcacaaaacacttaaatggaaacaagtattatgatgtactttattcacctggcattctccaattcatgacatttatatgtggcagaacccactgcagattcatttatttatttttgaagtggaatgagttccttacgaaggtagcctgttacattaatgtggacttttcttctctagatgcagaagcttaaggaaaaaagttattgtatctgtactataaataagtggtaagtctcagaatccacatcttagggctgagaaggctcctagcaagtacaatatactgtataaatatagacaaataaatatagatatagattttttgtgtaagcaccggcagtgttgcaaatgattagatatttcataaatgccttttctaaaaaggtattgctgaaaccagtctatttctagaacttatattcagatgtttagaggtataaatgcttcaatattggctaagcttagaaaggctatgtttctctgaggctcagtgatagacataccaacaatttgatgagatgcatgactaagaagaaaaagagagtaagactgagtccctgtgaattgattgacttggtgcagtggcagagtaggtagcaagtattaaagcaatagttcttaaatgttagtgttcataagaatcatcaacagaactttttaaaaatgaagattcctaggttttaactttagcgacttttaattctttaggtctggtatatttggttgtgggaaatcaaaagactcaacttcggaatacactgaacagttgctgactatagatttgtatattcaaaattttttggtatttaaaaatggtatgtatggtttattgagtcaaatattttaaaaactatgaatgtgtgctggtttgtttttttttttttttctggattggaggacaatttggggtaagcattctctatttaacaagtcataattaactccctgccaaaactaagtagaaattgtgatttctataactcctatatttgataatatctcctaaaaatatttcagtgatatagcatttaattgcaaataattcatctagtcaccaaacaaatgtagggacgttcctatataccaggcactgtgcatatcaaggtgtatattacagtgaataacagaaacactcacgaagtgttcaattgaatttaaccttgaaatgtattatttattattattatgtttaaataaactatgtgaggtttttttttcattgccaatgagaaacccaccctaacttcagaatttttatctttaagtatatcctattttaaccacccttacccatccactctcaatgatttctcctcagtgtggggccttgccgtggaagtgtgccctggtcagtgagttttgagagtccgtggaagctagattgccctcggctcttcagttcccactgcagaactcttgcagtcactggctattggatcagcagaacctcttctattttcagtcgcccattttcaaattggctcactgaactttaggttctccagttttcaggtctttcaaaagtccgacacccctttactatcatctgctttctcctacacaggggctaatgccatgcaggttttgtgactgctggtggtgtgttcctacctgctttttttgggaggcttctgggcacagctggtcacctagtttcattataatcatttttaatggctttgctgttgttgtgttgctgtttagttctgtcagcttttatcctgggatttagagagacccaagagttctgtggccacataaccattgatcctgattcccctggagtctcttttgacttttactgcctaatttaagctgaacatatgaaatacatgaaaaaactgaaagctcaagctcgtttgttgtttgtcttcctaggttatggtttccatttctccctctttctcaacctattttgccaatcaatgtctatccttccttcactttttgcctactcactacaatattcaattacacaaacataatttttcctctgcccaccccagcaccagcatttttctgggagtttaagtctcttatgaatctgggaagaaaggaactaaaaatgagcagggatgaatagcaaaatgagtgagtcaacgagtagcaggcaggacattagagtgaagctgttttcttacccagaagactgatgatgggaaaggaaaaaagaacaattcaaaattagtagaagaaaagaaataattaataaaacatgagtggatattaatcaaatagaaattggacaaaaaatagtgaaaatgaacaaacgcaatagtttgtcctttgaaaaggttaataaagttgatgagcagaaaacacaaagtaccaacatcaaaaacacaaattaccaacatcagaaatttaaaaaagagacatcaatgtcgttgcacattttataaacattaaaaaattacagttttatgaacagctctgctaataaatctgatgtcctgaatgaaatgaacaaatgaacacaaaaccaacaacaaaaaatagaaatagcctcacatatattaaagacatttaattcatatctaaaaacctttcaacaaggaaaatctcagtcccaaatggcttcactaatgaatttgccactaacataaaggaataaataatattagtcctacacaaactctttcagaaaaccaaggaagggcatatatttctcagctcattttgtgagggctacctaactttaatcccataacctaacaaagcactaaaagaaaagcccattagaatattccatatgaacatagatgtaaaataccttaacagcatattagcaaatggaatcctgcaatatataatagggtaatgcatcatagctgattggatttctcccaggaatgcaaagttagtttaacatctgaaaatcagttaatgtagtaagccacataaatagaatacaaaagaattcccaggtaatcatctcaatagatcaaaaaactttgaaaaagaattcaaaacactttcatgataaataccctctgcctactaggaatacaagagaacttcctcaaactgaaaagggcatctgcaaaaaccctatagctaatattatgttaacaataaatgttaaattttttaccactacatcaggaacaaagcaaggaggtttgctcttataacttctactaaaaattgtaacagaagtctaaagtaggacaaaatgaaaaaacaaaaagccatgaatatcaagaaagaagtaagactattattatttgcagaaaatatgccactgtatagacagtgggagtataaaaattgcttggcaagcatcaagtcccccacatacaatcccctcctcacactactctccttcgtaaagccatgaaaaaccgctttatattctaagtaaggacgggatgtttgatgtgcaaatgcagctgtaagataaatccctgagcaacatttttggccaccctgcccttcctatagaaagtctggggctgtcactgaggtagggttagtaatggtatgtgagactggagagatatgtggaaaccacctcatggtatttggtcttcactagttaggcaatagggagctattgaatatttctgagcacaggagtgacacagaggtgtaccaagtaggtaagaggcagtggaaacaatctacctcagtggggaagagtattgtatcacaaaatttgtttagaattgctagtacttggtgataattaaaagcaaaacaattttaactgaatcttattattttaattttacttacagaaagtgcatcctcttttgtgtacccaggtgtttcattctcaccaccttaccgtaggattattatcatcagaattaaagtagatgaggcaaggcacagtggctcatgcctgtaatcctagcactttgggaggctgaggcgagaggactgcttaaggccaagagtttgagtttatggtaagctatgttcgtgccactgcactccagcctaggcagcagagtgagaccctgtctcttaaaaaaaaaaaaaaattggaatgaatgaaaattaattgatagcagtttattaaatggattagggagaggaacagactggtagatatcattcagtatacaatagctggttagtgatggcaattctgaaagaagaagtggtagaaactgggaggtgttgctagtgtagtatgacctttcaaaactcacagagtgcatagcttgtggatgtatagaacaatgtgaaagaataaattctccagaaaggaagaagaggagttagagattttataaaagagaagtctatgatgttctctaggaaagaaaagaattttctgaagaatatatgcattgattaaatgatttccttttgccctcatttatatttattttctgttcaaatgaaacacttaaactaacactcaatttccgggacagatttcctgttcttacattcttcaatttgctttttaaatttttactttgtttagcaatatcaacattgcctcattggcttttagtgagtttcttgagaagatgtaatctatagaacattagttcttctctcccaccagacagatgagtgcatagaaagacatatagttatactgctgctgttttaaaagtgttgcttcaaattacctaaaatatagtgactattagataatcactgataaaaactgtgttcatctaatttattcatcttgaaatcatgcttcatatttcctttaagcacaaaatagttatgttcacacatgcacaataaatcatatatggattacttgatgccttgaattcaccctcatagaattttatctcctaatgtaaagaaaactgactggggtaattattgcaggatcttactcttttctgttgtcagtaaccttcccaccaaactcattgtgacaattgtcacccggttgactgtgcatatccaccattgctccagagcctaggccagcagacttttgctgcatggtccaaaatggtgaggtcctgggtgtgatcacaaggcaatatgcagcaaacattagtgaccatcagtgctaacaaagaaacttacaaagtaacaacttgaccacttggccaattcttccactgtgttttcagctcttcacaggtgtaggccatgccttaaacttaattgagtctagcactcttcctgttactattattatatttgtagcttatgataagcagagtgaatttaacataggggttatgatcatgcatttgagagttgggccacttagtaactgtattagtccgttttcacactgctgataaagacatacctgagactgggtaatttatacaggaaaaatttatacaggacttacagttccacatggctggggaggcctcacgatcatggcagaaggcaaagaggagtaagtcacatcttgtatgggtggcagcaagcaaagagagagcttgtgcaggggaactcttgtttttaaaaccatcagatctcgtgagatttattcactatcatgagaacagcacaagaaagacctgctcccatgattcaattatttcccactgggtctccccccacaacacataggaattcaagatgagatttgggtgaggacacagccaaaccctattggtaactgcaccacctttaataagtaatttgatctttctaaggtttaaattcttcttctgtcaaatgaagattcatgtattttcacaaataataaaatgacgaaaattcctgccactatggagcttacattgtaaagtgatttggggagttggaagagaaagaacaatcaataaatataaaaataagtaagtttatttactaagttaaatgctataggagaaaactagacaaagtaaaatgccttgagagtaccatattaaggaaaggaattgcagttttggaaatgtagccaagagacttttaattgaaaagatggcatttcacttgagacctgaaggagatgaaggagttagtcatgtggaaatctggaagaagagacctaggcagaggcagcagcctatgcaaacaccataaggtggaagcacccctgatgtattcagaaaaggggctgtatagctgaagtgagcagaagaaagagtaggaatgtcccaagcctacgggatccttgtgcaagctgcaaataattggtcctttcactttgcaagtactgccccacatccatcaaatactttagaaggtttgaaaaaagtttgactatcaatcacttgatgaattttcctgcccactatttgctctataccagtgtgaaatgtacagagtaatacttccacttcatctttaccgagcacttactatgttccagagatgatgctaaacatgtttacattaataatctcagttaatcctgacaacagacctatgaggtagatattattatgctcattttattgataaatacgtgaagacttcagtagatttaagttgttcagagtatagttaattctgtggctagtaattgtggcacataatcctaatgttccaggaatttatatcatttagttgaggagacactcctcaactcctgtctcaggtgacaggagtaagtgaaattctaaggcacaatatagcatggtgcataagcaggcaggactgcagccacagaaccctcaattttaattcaggctaagtcacttactttcccttttatgttagagacgtctgttagtttttctacaggaagtataatacctcacagggtaatttattcacaaatacgaaaacatgtataaaacatcatagcagtctgcctgcaatatcgtaagtgttcaaaagggttgtggatattattattgttgttgtaagctaaggaacgctagaaaaacatcaaagattcaattactcaaaataacttttgctgagcatctactacatgtaaaatatgtatactgtgggatcaatggatgatgtaaaggtgcaaaaggttctggcccttggggagtgtatggtacactgggaagttatattttcagacaagacataataattctaatacaagctagaccttaaggaattgaatgacagaggtaacaagaaaatgctgtaaaatggctgaggagagaaaaatcctctaatttgggaggagctcagtattgacaaaggctagaaatgggtagagaacactttcccaaaagagatgtcgtggtgcctggtgagacaggctgtgaacttgacttctcccatccgttccattattaatgtgtgtctctgtgctctagcattcatttcatcttgtggacatgctattgtttccatttaaaaactctcttgatcacaatttcttctgtggcgatggtctcatgtcctgctctcctttttggcaaaactccttaaaagacttgtctaggctcatgcctccaaatcctattctgctattatttcctggaaatatatctgtcaggccttcactctcatcattactttgcaacttttcttgttaaggtctccaaggacctctgtctttttaaacaaagctaaattctgtcttcattgtatttgacatacaagcaggatttgacacagttgatcactctcttttcatttagaggactccacattctccgggttttcctcccatatccctgactatttcttctgtatcctttttctgtgccctcctcttacctttgaacacttattgttggagtgctctggaactctctttagaggactttcctgtatctacgctcacgcccttggtgatattttacttcaaataccaattatacacagacaatactcaaatgaatttcacaatcatatttccaattaaacacttaacatgttttatatatatatataaaatattatttgaatttaattatctttatcttcacatcaatacataataatctatcagcaaatcatgttggttctattttcaaaaatatccatagtctttcattcttcctagattcaataattcctttgcttgtctatttagttttctatatgtcattaatcttcctcatgctgacgtctttgctacatgaatatatacatatatatggtacacatacatatatattttatgcacacacacatacatatttatgctcaaggacctcctgccctgctatcagcctagagcttttcatatacctctacatcctcatttcctgaatcccatgccttccattcttgttgctgttgtctgtttactttctttttgctggaactatattactcaatagcttcctgatataggaagttaaagttttgaatccttgcaaatccagaaaatgtttgtattctttctttacaggcaaccgataatataacttagcatagaattctggattagaaataactttactcataatttggaaggtaccattcttagctttttagtttactataatgttgcagaatactgcagtgatattctgtattttctatgtgacttattttattggtctctggaaatttttgtttcctttttatttttggaatttgaatgcttcatgagattgcaccttgatctgggtttttccaccagcatgtggtgagccttttttttaactttttaatattttatttttaatcaatcaacacataatatttatacctattatgggatacagagagatatttcaatacatatgtaaaatgtgtgagtatcaaatcagtgtaattagcaaatccattaccaccaacctgtatcatttctttgtgttgggaacattcaaaatcctttcttctagctatttgaaaacatataataaattgttgttaactatagtcaccatacagtactataaaacacaggaatttattcttcttacctatctgtgattttgtatctgttaaccagcctctccctatccccttctccctgctatccttccaagactccagtaaccactattcgaccttctactttcatgagatcaactggtttagcttccacatatgagtcagaacaggtaatatttatctttctgtgccaggcttatttcacttaacataatgtcttccgggctaaacataatgccctctaggctaatccatgttgcttcaaaagacagagttttattccttttcatggctgaatagtatttcattatatatttatatatgtgatatatgatatatatatatatatcaaattttctttatctattcctttgctaatgagcacttaggttgattctatatcttagctattgtaaatagtactgcaataaacatgggagtgcagatatctcttcaacgtactgatttcaaaacgtctggatatatgtacccagtagtgggattgctgaatcatatggtagttctctttttagtttttttaagtgaccttcatacttttttccataatggtatgctaatttacattcctaccaacagtgtataagaattcccttttctctgcatccttgtaagcatttgttattttttgtcatttttataacatattttaactgggaaaagataatattgtggcttttgtttgcatttgtctgatgattagcaatgttgagcattttttcgtgtacttgttggctatttgtatgtcttcttttgagaaatgtctgtccagaccatttgcacctgttttaattggattatttggggccattgagttgattttcttatatattctaggtattaaacatttcttggatgaataccttgcaagtatttttccattctgtaggtcgtctctccactttgttggtagtttcttttgctgcgaaagggcattttagtttgatgtaattccatttgcccagaccaatgtcctgaagcacgtctcctaggtttacttctagtattttcatagttttgggtcttacgttgaagagtttagtccattttgagtggatttttgtatatggtgagagacgggggtctattttcattcatttgcacatggatagccagtttccccagcaccatttattgaagaggatgtccttttcccactctttgtttttggtgactttgttgaaaacccgttggcagtaaataggtggatttatttctgggttctctattctgttccattggtttctgtgtctgttttacgacagtatcatgctgtatagctttgtagtaaattttgcagttaagtagtatgatatcctcagtcttgctctttttgaacaggtgactttgtctcaagattgatttgtctagctcagtggggtggctcacgcctgtaatcccagcactttgggaggctgagttggacagatcacttgaagtcaggagttcgagaccagcctgaccaacatggcgaaagactgtctctactaaaaattcaaaaattagcagagcatggtggcgggcacctgtaatctcagctactcaggaggctgaggcaggagaactacttgaacccaggaggtggaggttgcagtgagccaagactgtgccattgcactccagcctgggtgacagagagagaccccacctcaaaaaaaaaaaaattgctttgtctattctgggtctttatggttccatgggaatttaaagaattttttcttctatttctgtgaagaatatcattagtattttgataggaatcatattgaatctgtagattgcttttgataatacagtcatttttataatattagttcctctaatccatgatcatgggatgcctttccattttcttatgtgtcctctttaatttctattataagttttatagttttccttgtacagaacttttaccctttggttacatttattcctcagtatttttgtttttttagctatcgtaagtgagatttcatttttacctagtttgtgcttgttgtataggaatgctactaatttttatatattgatttgatatcctgcaactttattcgtttagtttatcacttctaagagttttttggtggagtgcttagtttttattacatataagatcctgtcatctgtaaaccagaactagttgacttcctcctctccaatttgtattcctgttatttctgtctcttgcctaattgctctggctaggaatttctagttctaggttgaataaagagtagtgaaagtgggcatcaccatcatgttccagttcctagaagaaaagttttcaccttttctccgtttaataagatgttggttgtaggtttgtcatatatggcctttattattgaggtacatttcttccatactaatttgctgacagtttttagcataaagggatgttgaatttcatcaaatgctgtttctgtcttttgagatggtcatatggtttgtccttcattctgttgatatacttttatttatcccatttattcaatttgctcatattgaatcattcctacatccttggtataaatcacacttgatcctggtatgtaatatttttgatgtgctgttggattcggtctgccagtattttattgatgatctttgcaactatggtcatcaggaatattggcctgtagtttttgctgttgcatatttggttttgctatcagggtaatgctggccttataaaattagtttagaagaatttcctctccttcaattttttggaatagtttaagaaaaaatggtattagttcttctattaaagtttggtagatttcagcagtgaagccattgatcctggacttttctttgttgggagactcttaattactgaatcaatctcattacttgtgagtgttctgttcagtgttctattcctccttggttcaattttggccagttgtatgtatccacaaatttatccatttcttctaggtttttcaatttgttggcatatagttattcataatagtctccaatgatcaactgtatttttgtggtttcagttgtagtgtctcctttttcatttctgattttatttgagtcttttttctttttttctcagtctagctaatggtttgtcaatattatctttcaaaatatcaactttttgttttgttgagcttttgtattgtttttggtctcaattttatatccttcttctctgatcttttttatttctatattgtgccttgcagaggacctttctagttaaatacatttgggaacttttgagcttcctggatctgggtatctatgtctgtcccaagacttaggaagttttaagttagtatttcattaataagtttttattaccctttttgtcatcttgtctttctaagctcccacagtatgaatagctgtttgcttaatggtgtcccacaagtcctgtaggctttctttattctttcttattctgttttctttttctttctgtctgcttgagttatttcaatagacctgtctttgagttcataaatcatttttttctgcttgatctagcctgttgtcaaaactcttgattgtatttttatttcattaactaaattgctcagctccaatatttctgtttggttcatttttatgataccaatttcttgttgaatttctgatttagatcatgaattcttttcctgatttttttcagttgcatatctgtattttcttctatcttgctgagtttccttaacatcattattttgaactccttttctggcattttgaaaatctcttttactttggggtctgttactagaggattattgtgttcctttggtagtgtcatgttttcttgctttttcatgtttcttgtgttcctacattgatacctgcacatctggtaaagtaattgcttcttttaatgttatggactagcgcttatagggaaagatttactcctgtagataagttctagagtgttaagtagagggtgataacttgggtcctgagtgggcacagtagtgtagtctctgtgaagtttcttcaactgtaatccatgtcagtaatgtttgtgaatgcttcactgacctaacctgtgggagtttgtggcagcagtgacatgactttactggaatcaggcttattgagtgagttatcaggatggaggcatgtttgtgcatgtgatgggtcacctagcttaggaactggcttgctttgggtgaagccgtgggctgtttctcaggccgggggcatgagtgttcagtggatcagctggttctggaactggttcaccaggagtgaggctgttgggtcgtttctcagtttaggggcataggcacatgttggtttgccagccattaagccttttaaaactatggtttcatgtctggaaaatgtgtattttatactaattctttattaacttattcctttaattttttttccttttggtgtatttctgaaaatttgttttcatctcattattattgttagcctttctgatgtattttcttatctttctcttctaatcttttagttgagatttttttccagcctttttttttttttttggatatagaatcttagtatattgtctaggctggactcaaactcctgggctctaacaatacttctacctaagcctcctgagtagctgggactacaagcacatgccactatgcctggctgtatatttttaatatttaagaattctttctttcaccaattgtttattcttttaggcttttttttgtttctatattttttaatgaatgcaacttttatcttctggggataacagagatattttattaaattgttattagttgatgatttcttccatctctaattccctgcattgtttgtttcctcatctggattatcatttttcatcctcctcctttatttttgtttctgtcattcacattgtatattttgcacatttgatgaattttgccatctgctttattctgtagagaaatggtaaaacatttccaaaatggcctttactcatgtttatgagcagcaatacagctttactttgcagaggttaaaagctcaaatattagttctagagttcttatctttgtagtatttttctgccagtttcctctttatggaaaataactctggctcccggctttctttaaactgtgtagaaggggagttgtggtggtaaaggggagaggcagtgtatacagactttcacttaatcctttcatgtctaccttgtgcctcttccaataacaagttgttgatgttccaatataatggagctggttaatttcaattattcttgacaataagactgatgtcactgtggagtaggattagtttggctggctgagtggggttgaaaaggggacctgaaaatctaaatactttctatgtggaatacctctaattcatgattctcaaccttggcactatggctattctgggctgggtaatttgttgtgagggatggatatgtgcattgcaggatgtttagcagaatccctggctacatatcagtatactacatgccagtagaactcctcccctcactgggacaaccagaaagttcctctggggacaaaatcttccttagctgagaaccattgtttaactttagacctgtgtgtgtcctcttacttctctcaatgtttcattatcttcaagtcttaaggctctcaaagattctataggaaaaatcagttttcatgttttaggaatccaattcagctagcactcaagctgtaacttctctgattattcaagaatgttgtcaatatttatttctatttcttaatttcattttctgtcttcaaaatttttgtaaaatgtatttcttccctattgatttctctgctggcctcattaaaattatgggttatattttttaaaattcctatttttttaattgaagtatcaagaaaaagaggaaaaggcacatgcttgatctgaactttatcaaaaattggtaattgttttcatctcttactattaactcttttttaaatcgatcctcttgctttaggaatccaaatcagcctgcactcgtactgcagtttctctgattagtcaagaacgttgccaatatttatttatatttcttcatttcatttttcgtctttgaaatttttgaaaaatatatttctccattattgttttctctgctggtctcattaaaattatgggttttacttgttaaaattgctgttattttaaagtagtgagaaaaagaggaaaatacatgtgcttaatctaaattttaccaaaaattttatattttagtaaatgtattcagatgcatatttttctgacaatgggcagtcttagttaacacctgtatcctttttcttgagcaagaaaataaatttattataatttttacttattctgccctagtattcctcatggataaatcgtgtcttaattttattaatctttgaatgcatcaattctaataagttggatcctttgtcagaaagcagaatgtgtacaatatacttatcccttagttttgtcttcctgggaactggctcttgatcacaataggatatatacctacagatcagcttcattataatttaatttactgtatttggcagcaacatcttctagtggtaacctagaccgagatgaaatattccatttcaattgacagttataaagctacagaccatagatttcagttatttgagtagttactacattaaaacacatctttttttcccttcctttgctcccaaccacatgtgcagcaaccagtatgtttctaaattttgctcctgtttataatgctatttcttaagcttctaaacatcgcagtgtgcatttcacctctgctaatctccatccaaattctgctatgttttggagtttgtaagaaagtgtagtgctgatgaggggattgaagtttcaggattccaattttggctgcttaacaggaacagttgaaggatggcatgaggtttttgatccatggttttccatttccctggtatagtaagcataggtatcactgccaaacttctttggagctctatgttatttgggttgagagcttggagctatgttaaacagctgaataaatgtttcccaatgcagctctgtctatgatgcagctcctgaaaattctctctgaatgttgtcaactagttttctcttaaattgagtttatagttgttttgtcaggtccaaatgtctttttgagactttactttgactgaacattgtgatagaatttatcctcctgcttgaaatgataaaaatatggacaaaatgtattaaataattgtttgctagatgttggacatcaggcaatgaggacaatgtttgctgagaaataggaaataaattatgtgaatcttacaattgacccggattactgcttacagagtatttctagaccacgacttagggagagaaatcccagatggagctcagagagttctccaaattgaagagatatagccaagtgtttcaggaattcaaagtagttagagtttgcagagagcagatagaggaacacagagataatttcacagatctacagagcatcttccttaagaattcactttactacggttcactgcatgtatgaggctgcagaaagcacaactttcaattattaaaagtaacaataattaacactcatgtaatgctgggtatgtgcctatttccactagctgaactggcgagaaaatttatgattcgtgggatatttgataagagtacacaaaagggtctagcctcaacagtggagaatagccctaggctgataactacttcaataccacctaataaatcttaagagcaagactcaaaaggaactgtttccaagtaatttaactgcatccaagaacaaaacacaaatatatttgtaagaacactgaaatatgtagtacctaacaagaaaaaattcacagtctctggcaccaaatcaaagattatcaggcatgtaaagaagcaggaaagtacaacttataatgaggatgtaaatgcatcaatcaaaattgatccagaattgtgagaaatgttagaattatcaggccagtatgttgaaacagatattacaactctacatagtttaaaagctacataaaaatatggaaggtactaaataaccccacagatcaaaattccagagaaaaacctacactgtatggaatgaaaatacactggatataattgattatacattaaacataaaacatttatgttatatataaaaaattagtgaacttgaagtcatagcaatataacctatccaaaatgaaacagagttgaaagagcatttgtaaaaatgaaaacagcatttgtgagctgtgggacaacttttagaggcttggtatatgtgtaattggagtccctaaaggaatggtggggtggaggtgggaatataaaaaatattcaaataatttatggctgaaaaattccaagtacagtacactgaaaaccataaagccacaaacccatgaatctcaagaaaactaaaaaataagtaacatgaaggaaatcacaaaaggcatattataattgaattgctcaaagctagtgataaatttttaatgataaaataaaatactacagcagccagaggaaaaagacgtgttaaatacaaaggcaaaacagtaagaatgacaacagatttcctatccaaaataatgcaaagaagaagacagtggggcaacattcttataactatgaaagaaaataaatagtgcacttatgattctatatctagtaaagatatctaagatgaaggtgaaataaaaactatttgcaatacatataatgaaagagttcatcacacagaaacctatactataagacacattaaaaagaagtccttcagtaggaaataaaatggtatcatatggaaatatggatctgcacaaagaaacaaagagcacccaaaatggcaactgcattggtaaatacggagggtatttttctaatgatttaattttctttaaatatagttgacagtttaaaaaataataataatatagtaaaagttttataacatgtgtaagtaaaatgtttggcagtaataacacaataattaagagggggaaaaggaagtacccttgacccttgaacgacatgggagttaggggcactgattccctgcacagtcaaaaattcaagtttaattttgactctccaaaagcttaactactaatggcctaccattgaccaaaaaccttactgataacatgaacagtcaattaacatttattttgtatatattatttactgtattcttaccataaagtaatctagagaaaagagaatctttaggacaatcataagaaagagaaaatgtatttactatttgttaagtgaaagtggatcataaagatctttgtcctctttatcttcactttgagtaagatgaggaggaggaataagaggaagaggagagattggtcttgtggcctcatggctggcagaggtggaagaagattcttttataagtagactcatgcagtgataacccatgttgttcaagggacaattgtataccgttgtaagatccttatactctatttgaagtagtctgtcacttaaagctaggctgtgataaagatgtaggataaaaaccactaaaatcataaaacaaagagttataactaataaaccaacatggagataatttgaatcataaagaaatataaaataacacaaaacaggcaaaaaaaaaaaaaaggaaaaaagaaatcccaagcagatgggacaaataggaaatatcaagataatagatttaaacataatcatatcaataataatgctaaatttacatattctaaatactccacttaaaatatacagattggaagattggttaaaaaaggaaaaagtacaacttaactatatgctgcttacagaaaagatatttaagtataagacacaactaggttaaaagtaaatgttggaaaagataaatcttgtgaacactaatcataagaaatctagggtgactttattaatatgagaaaacatgaatttttagaaattttgtccaagataaaatattgcccaggatgaagaaagtaatttcattttgcaaaaggagtcattttgtcaataggacataacaattcttaatatttctgtaccaacagcagagcttcaaaatgcacagagcaaaaactaacgtaactgaaggagaaagtaaaatccacatttgtcggcaaaaatttcaatacccttctctcaataattaatagaacaaactgacaggaaataagtaaatctatagattagaacaacactgtcaaccaacttgacccaatggccagttatggaacattcaacccaacagagcagcaaactacacctacttttcaggcctacacaaaacatctaccaaaataaatcaaattctgaaccataacacaagcctcaatagatttaaaagaattcaaatcatataaagtacattatggggctgcagttaaattaaattagaaatcaataacaaaataacctggaattactctaaatatttggaaactaactaacaaaattctaaataatccaagattagaagaggaaacccaaagaggaattaagaagtattttgaactgaatgaaaatgaaaacacagcataacaaaattgtgagatacccaatatggcaggacttagtagtatattaatagcactaaatgcctatgctaggaaaggatgaagatttcaaagaaatatcttctactttacaaaactagcaaaagaagggaagacccaagccaggctaatgaaagctatttctgagtttctaactgcatctcatggggatgatcatttcttttctctgctcttgtggctgaaagcatgttaaggccaaaattgtgattcaggcaagacccaaatttataagaccaagattgcattttaagccataaagagcaggagaatctccatggcttgaactgtgaatagatatttgtttgttatcagagatagtaattgtactgctttatctgtatttccttccatgttagtaaaagaaagctcagaagtagttgatcacatgatcatagagaataaactacatttctcagtctccttggcagctaggtgtagaaatgtggtttaagttctggtcaatgatattttatctattaacgtttgctgtttaagttagtggctaaaaacaataaaaattgcgtatttatttaggattctatggtttggctcagtgctggtgtgcactggcttgtccaacctcttctgggctctctcatttgtctgtgattagctagctggtcaagcagcagttagataggaagacctcactctcatatgtggtggttggcaagctggctgttcactgggacagtaggagcaattattagctggggcacctcagttctctgccatccaacctctaatattccagcaggatagcatgagcttgctcacaaggtgatctcagagttccaagcccagcaagaaagaatgaactctaaatttgcaggcattttaaattgtctgtttgaatcatatttgcaagcattatatgtgctagtatttggccgaagaaaaccaataggtcaatctagagttattgtggaaggatcgtaccaaagagtgtcttagtgtatttttaaaggaaaggggaatgcctttctctctttctacttcttggtggacagcaattggttttagagtatgagtagatttgtattttctcacattaaaaaggtagaatctacaactgtggaatctatagaagtaaactgggtattttcagttgaatcttgggaaactgactaaagttaacatttttaaaaataataatgctttattttatttttaaactacattttaagatatagttaatatacagaaattataatctatatgtgttacagagagattaatgaaatgggagtaaacttgttattttattaatttgtggcagagttcatatagaaagaattgtttttattgacaaaaatatctcgataagacttaggttttggcaagaatcaaggcaatattatacacttttgagatgtctgtgaaaaagtgaccatgtaaagtcaggtgtatagaaaaaagtgaatatgctttatagcagagcaaggaggaagaagagagaagccacagaagatggtagataattggagtgcaagatggtaggtaattggagtgccaatgaaaatctctagctatagggaaactaaagggatattatgaattgcaaagtaatgatttaattcctcttttaccccgaatctttaataaggtttaacgactacaatttgtttgtttgttttgaacaagacttcttgaaattgaggcattagctgagtttcacctctgggtgacatagggcagtgctggcagaagccagaaagacttcaaaatggaagaagcagaagtgtagggtcagggcgactacgaaatgatcaatacgcatagaattcttataaacttaaggaggacttctgtcattcagggatggaattagggtcataggctgccttatctagatttcaaaaggcaaggacgctccagatgatacatgcattacatgtaaataagaatacaacaaggccaggtgcagtggctcaggtctgtaatcccagcaatttgggaggccgaggcggacagatcacctgaggtcaggagttcaggaccagcctgaccaacatggtgaaactgtgtctctactaaaaagataaaaaattagccgtgcctggtggcccagctactggggaggctgaaacaagagagtcacttgaacctgggaggcggaggttgcagtgagccgagatcgcaccattgtactccaaatttgcaggcatttttaaatgtctgtttcaatcatttttcaagagttaaactccatctcaaaaaaaaaaaaaagaaaaaataacaaaacatataaaagataaaggttttgcacttttatttctctttaccttttgcacacttccttgctctttgaaaaagtattgtttacatgtaatgtttaagattattctttgacggaaacatcacatatgtccaatgccttaaggtgtttactatctctttggagaacaggactgatcctgtaaagtaccagcaaagactcaggcctgagttatgggttgatgtacttgaagtgttacaagtatgtacccacacgcctattggattttcatggtatgcctatatgttacacatatccaccaataaatgccatctatttttgtaggctgaatcaaatctctgtcttgagtaatgattttgtatcctttggactagatctgaataagactgagaaacagccaggcacaagaaggcaattcattgttctcactcatctttctaaacctatatgcatctttgatattgaggttcattattagctacaactacatttggtttgcatataaccatttatttttcagtcttagatattttcatatcaattgtcttaattatccttaaataaagcttccagtgagtctctatttcttggatgaggacaattgaggcagtgatagttctttaaaaattatttaatttctaagtccttcactatatcttgtaactgaatcccaacctagatatttttaaatatccttgaaattaaatataaatcaaataatatctttccacatgtaggttacttccctctatggtaactctgcctccaaatgtgaagagctggattcaatccaagtgaaagaaaatcagtggggaaaatgtcagggactataaaagagatttgaagtctgtacccacattgctgtgttagagtcctgagttattaaatttctcatatttatttgacattttatatacatatgtccacttatgaagagtttagttcttatctttctttaatcaacacagtattaactatgcatgtagtagatgaacactgtattttatgtatttgcattcttttcaaaccagatgcttaaagaataaaatgacacagtgttttagctgttattttgctttaaaatgctttaaaacaagaaacatttttggaatttcttatcacaatataaatcagctaagtatatttaatgtggtgaaatgaatcataaataggctgaaatagtcctaaaaggggagttgggtaagaaaaaaatgtattaggatcaatatcaataggcataaataattctattaacaaataacattaaacattgttacactgtttatgggatgatatcattatatcattatagaaagattctcccttaatttaaatacctagcatgtacaaaacaagtttaaatcaatgagacagtaaacaagaggaataaaatagagaggtgggctgggtgcagtgattcacgcctgtaatcccagcactttgggaggccgaggcgggcggatcacgaggtcaagagatcaagaccaatatggtgaaacctcgcctctgctaaaattacaaaaattagctgagcgtggtggcgggcgcctgtagtcccagctactcggaaggctgaggcaggagaatggtgtgaacccagaaggcggagcttgcagtgagccgagattgagccactgcactccagcctgggtgacagagcgagactccatctcaaaaaaaaaaaaaaaaaaaaaaaaaaggggaagtggtgtcctaaagactaaattaactgctgactattttctattttcagtctctacatatttatatttttatttctttatatagcattgaatggttaattccccatttcccttttattcttatacgactaacttctatgggttttattttcattcagttctgtatattccccctgctgaagcctcccatgttgtgtgtcaagaggaaaaatatcttattaccttcttgtctgttgaacatttagttttcttctccctccctccctgtcttgtacctaatgagcaaattatctaaaaatagatacgttcatcattctacaaaatgttgtatcttctctagattggaggacagtgtaattgtaagagacacgtgtctggcaggcagtgcaatcagtgccagaatggattctacaatctacaagagttggatcctgatggctgcagtccctgtaactgcaatacctctgggacagtggatggagatattacctgtcaccaaaattcaggccagtgcaagtgcaaagcaaacgttattggtacgtgtaacgcaaaagtttacagtcacatctctattaccatctggaataaaattctctatttgatttcttaactgaagagtaaagcaaatttctttgctcaagacaggctggaaaaaaaaacaatttggatgaaattaactgtttaaaatgattaaattaataattctatcaaactgcagcttgaagcttagtttaatcaaccctttagaagtttctttattctgtagatgcattaattcccatggtcccatactaataagtcatagaaaaatataatttgcttactgcatagatgtttcttttagaaaattagcactttttcaaaatgttttacacttaatgagttctaagcaaatcatttccatgctagttttcttaatagaccaaaataagtggattttttcaaaatattctgtgctacagggtcctttgtgataaatctttccatttttttctgttatatttctttgaactgttcctatgaaatgcaaaataagtcaacataattctacagatcatgtatattgctagggttacttacaaagggctacataattttaattttgtaattcagcaccaagttgattataataaacagctgccttcggtgttatttatcatttttttatacaagacgtgcttttttgtttgttactcccacaggtatttttcggaaattagatttgattatagcaatttattacatccaacatttttgaggggaaccaccgccacataaggacaaaatttatcaagtgcctaaaatgcactatgttcataatgcactttgaaattttgatatatgagaatattatgagaggaaagtttcctgatgaagtgagccctgtattgtaactgaatatgtcttggttcctataggaagtttaaaaaagacctttgcctttctattgtcattcaagacaccaagtcatccatggtttttctaacactgacctgaaccttacaatagtaaaaatatgcctggcagtgattacacacactcctctctctctctctctctcacacacacacacgaatgcttacatgtacacatgcatatgtacatatcattctgaatactattttcatttctgtgatatacctctaaatctaattctttatcttttatttatgtaagtgtacatcatgctacacaattcagctagacaagcgtttcaatttaataaagagaatgtaggtgtgtttagtggcattacacgagatttctctggtttaaagaaacattacatgaaaatctgtaccataatttacctatatgcatctcaagcatacagaaactaattttttagaaagaaagaataacgtgtaaagagaagtacatatttgtatgtgctatccatgatgctgaaggaattctaagaccctgaattcaatttgtatggcatcctttgttctttaatgtgagatatattttaaactcaagatgtgaaaacaaaagttaaagcaagacctttaaagacagtgaaataattacttctttgtatcaatggaatctttcttgtgatggttagattccagagcttgaggaagggaaaaatcaaaattaatttagaatgtataatgccatccctactatttgcctgttttgttgattgatccagatggttttctgcaggaaacataaatatatattttgtgaagactaaattacttcagtattataaataattattatttctagtgttatttctgcaaatgtagtactttttataaaaacaaaaacttgatatgcatatatatttactttcctaatgggatcagcaagtaactttattcaatttcaccttgttaatatgaaaaaaaaagaagcccagaaaatacaagtgtatgttgtatacgcttcagaaagcaaactgttagagttaacaaaactgttaaatcttactaatgattctatcaccagtaaaatacattagcaccaataattttattaaagtaggtcattcatctagaataaaaagggagaagaatgtgaattaaatgccaagtgtgctaactcgcctgtacttgttaacaccgaatgtgatgccctgtaggccttcctgactatcgttaggaatagattacctgtcaggaatatgtatggcatattcaaataagcactgtgcatatttttaaaactgatatgatatgaatccatgtagaccaattttaatagttcaaaatgagtcataattcttgttaacaatacagttatttttaaaatttgcagcaatagtggtccttttttattttccttattgaaattaaatgatatgccttaggtgagtcattcatcactgttaaagaacttgccttcattggagttcttgaatttttatccatatatatacatatatattatgtatttccttccagtttaggaaatgcttttctacatatgagttcctgagtatgtttttgactcttattttaagattaatttttaaattgcaattatagcttgaaataaatgtttcagttgattcaacccatgcagtgagttatttaaattcatggatatttggaaactatctaaaggaagtattttgcatctaaacatttactattctaatttttttatttctttgccttgtaatacccttttatcttttagaataaccttacttgtcagagatttaagtttaggtgataaaacatttttcttcattcgtaaaatgtatatgtgtactcctttaaatagaagtaatataaaaaacagaatttacttagtgtttaaagaggtatgttctgagtcacacaagatgacaagcaatgtgattgctttatgagccaaggagagcatgatttatattaattgaaaatgataaaatagaggagcatacaaaaggattaaaccaaaaattgccctggataagttttatttatattaattacttaaatgtgtggattcagaaataagtgtatatgctgttttcacaaaaatagttatcagctgacatttttttcttttttcccagcttcacgaaggtataattaaataaaaattgtatatatttatggcagacaacatgatgttttgatatatgtacacattataaaatgattaattccagctaattaatgtatccatcacctcatgtacttatcatgtttttggggtgagaacatttaagatctaatctcttagcaattttcaagtatacaatacattattattaagtatagtcaccatgctgtacaatagagctccagaacttattcattctgtctagctgaaactttgtactcagcttaaccttttattaaacatctttagagatttcttatctttagaaaaacaactaatttgttatatgtaattctactataattttaaatgagcacatttgttaaaatagtttttaagatttgttaaagagaaaaagagctccagcatatgtaacagaaacaacatttgcattaagcatttttctttgcattaagtaataattaaaaatttatgaagttcatcgcaaacagttgtatattaaagctaaattaaatattgtcattgaattttgagagtaagattggccccctatggcattgcttgtgagaaaacactcaatattttgtgttcgtatcatctgcagtagcattgtttgtgtctcgtctatcttgaatgaaatcattttcccatcctcaccttttaaatatattttatctttagggcttaggtgtgatcattgcaattttggatttaaatttctccgaagctttaatgatgttggatgtgagccctgccagtgtaacctccatggctcagtgaacaaattctgcaatcctcactctgggcagtgtgagtgcaaaaaagaagccaaaggacttcagtgtgacacctgcagagaaaacttttatgggttagatgtcaccaattgtaaggcctgtgactgtgacacagctggatccctccctgggactgtctgtaatgctaagacagggcagtgcatctgcaagcccaatgttgaagggagacagtgcaataaatgtttggagggaaacttctacctacggcaaaataattctttcctctgtctgccttgcaactgtgataagactgggacaataaatggctctctgctgtgtaacaaatcaacaggacaatgtccttgcaaattaggggtaacaggtcttcgctgtaatcagtgtgagcctcacaggtacaatttgaccattgacaattttcaacactgccagatgtgtgagtgtgattccttggggacattacctgggaccatttgtgacccaatcagtggccagtgcctgtgtgtgcctaatcgtcaaggaagaaggtgtaatcagtgtcaaccaggtaagaaagaaatgtattacattttcagtgcacaatgacattccttttgttaacttaggtaacttctccctgtttctggtttgtggcttctacaaattttatttccaaaatcattactgtatttatatcattatccaacacatatataactatttaacttattcaaaattatctgcatatttatgttactattttgagaggatactttagataaaactcagccgatcggatttatttcataattgagactcaatttctacacttgaagtaaatctcctttttaacagttttttaaaaatcagatcaacaagagtcaattttattttccagagaaaggaaaatttgagttgaatatccatacaatgccaaatattcaaatgatgaactaaatctctgaataaagctggctaaatgtttttgctgaagaggctatatgttctagttttatatagaaatacctagaattgtttccacatgccatcaaattaataaaataggccactgtttaatctcattatatacaaacttatctttccatctctttcccaattgggagagggatagaccccatctatggctctccttacatttaagattttaactaaaatactataccttctttacaataaattcattatgatatgatgataaatataagtacttatccgttgtttaacagctgtgctaattgttgtcctgtcagccaatattagctctgagttatatgggtctataaaaatgagcatgataccaactcaaaagtgtgatttgcttgccagagaaggagtagaacaaaagttctgttaacatagcaaagaatccagcctaggataattgggccatgcttttcctttggcattggtcagtgtgtaagatcaaagagacaagaaggaattgatgaagagttcattctttttgtgatgtaagtattaaaaaacaacttgaactggtttaaacataaatggagactatattataactagatactccataaaaacctaaggagaaggaccactgcagtcaggactcaggaattagaatgcttccactgatacatattcatttgtctctctctctctctctctctctctctctctctctctctctctctctcagaaggggactttacctctctctttctctacatgggtatatggccaccctatgtcccctgaaattgtttataattctaccaccagccacaacagagcgatttattagctacctcttagttataatttctagaggaaaattcgaattgactcagttttgtttggttggttacctctgagccaattcattgtggccaggggtgtcacgtacttataaaatgagtatagcttttagggaccatttcatcaggtagaagcaaggtggtaagtatcccagaagacaggaagattatggagacctgggcagacagcctaaatgacagatacagcacattcactctttttaccttcaggttaatcctttcaaatttgcaatcaattaactttttgatatcctaagatgagatgtttttttctcttttagtgtttatcaatatctctaattttggcaacaaagtcctttgtctcctacacagtcaaataaccatgatttatacatccttctttctaagtaaaccaaaacaagctaatagatcaaatgttatatccttttgagtaattatcaattgttaaaatttactgttccagtctaactttaattgtatgtataatacaagtcacatgttttaaacaatttttctgattttggaaaaactctgaaatcatagttacaaacatttgttccctttggtccttccaatgaaagacccaatccatcatctcaatactttgtacacctaccagatatctaaatgatgaactaaaattgttagaaaacctttgtttttctggttgttttgcatatcattgcagaaaaagccatggataatttaatctacaccatgcataagactgtctcatttgttcccttcctaggatgaagaaatactgacttcattgctctttcctttatctttgtggctctcattgtggtgatctctttgttcccaactctaagcccttttctcccacccaaatctatggctctttcctgtctaccctatatagtattggcagaataattcccctaaagcacttaattcgttatgtcattctcctgtagggttaccaaaaatgggttttattttgcttatcatttgagtccaatctgggcaaacctttatgagtttttatcttccagtcgcagtctagacacctagctttgcttcctgatattccctttctcccatcttcttcagtcactgcagccacttcactggagctacacatgtcacatgcagagccgatttcaatctacctgatgctttggttcattctcctttcccgacatggaatgcagtataatcctccttttcaatgttagttggcatcctctgactagttttactactcaacatactgcctaaaattctccatcactcagtgaacaacaaagttgacatgagcatcagtgttttaagaggtggtttaactcaaacctatagaaaacttgaaaataaggtgtttttgaaaatgtgctcaagcttctattgtcttcatgttcaatttattatatgaccttgaagagaggtttatgttcaagaaataataatacagatctcattgtaattaccccataattatgcttcttttttctgaagaccatatggacctataaatgaagtcaatgagttaagagtagggagcattaaacatggtgaaaatatttttatttactgaaaaaattcaacagcgtattgtaaaatatttagtagaaaatgtaccagactgagaaaacatatttggagctccatttcttcagcttactgactctctaaaggcattcccctgtccttctctacagggaacttccatattttcttccaactgtccatttctagccaggggtaagcagatttatctttaagctgttacctgagtggagcctgtatcagttctactcatatcctattgatcagagctgctttgtatatccatacctcactgcaaaagaggctggcaaatagatgctctatctgaatatcaaggtatatatttaaaacttggggcctcttttattataaggagtaagaaagagattgatccttgaagacagccttggctatactaggaatgtcctacacctaaaaaaattagctggcagaacattagtcaacttccgaatagatgcttttaatgaccatgagttttgtacttttattgatagatcccattattatcattttttaaaaaaatcagccaaagttaatgaaggcctcttgagtcctgaggaaatatatgcacaaaatcccttcttgggatcttcgactgtttcttacatgctttgccttatagactcactgctattctagtcactcttccttccaaggacatgctacagtttatagtggccctgctgagttattgacccaggatattaacctggttatgaaaagctagaatgatcaagctacagatttggattattatattttgttgaacagtgcagttattttcatatagataaacatttctcttactgagaaatcattttcttctgggtactgttgagttcttaatttaatcagagaacattttatgtgtagtagcaaacggtactttcagtgagcttaaattttgatggggaaactgacagaataatttgcaaataaatatatgatatgaatttaaatagtgatgatttttggatctgtggctctactcaattatgtttctttcttgctaagagtttaagatattatcgaggttaccaaatagactatttatttagcacttttatatcagtgtttagtttccagaaaggtgaactgggtagccatgtttatattgtacaagtgaagtcacattgatattttattgcaatggaaacagtaagtggtttaaaaggaggaatggtgaagtgaaagaaattatcaacctgtttctttttatattattatctaaaactagtcatttttctgtttttctcttttgcattttttctcatttaagatcataagtgcctgttttaaaaagcagcccaatgagatgaccttgttaaaactcctgattatttctcagtatcgtcaattaaatgaaccccttattgtgtgcccacaatgtacaaggaattatatatacatatatatatattttttttttctttttttttcttttgagatggagtctagctctgtcgcccaggctagagggctagagttcagtggcgcagtctcggctcactgccagctctgcctcccaggttcatgtcattctcctgcctcagcctcccgagcagctgggactacaggcctggctaattttttgtattttttttttttttaaagcagagatggggtttcaccgtgttagccaggatggtctcgatctcctgacttcgtgatctgcctgcctaggcctcccaaagtgaggaattatattattattgtagttatgcaagttgaataaggtaatccttgccctcaagatattgaaactttaacaagggaaataagacatttgcacaagtaaataaaatacgataatactttaaatgtgatcattgtttttcagtattagtgttgatgcccattctacatcttcctctaaagaaaagaagacaatttgcaataaacctttggaaaggagttttgttgcgtctgtacttaggcaaatcgtgactaagaagttattctcctaatggccgcacatggtggctcatgcctgtaaccccagcactgagaggctgaggcgggtggatcacctgaggtcaagagtttgagaccagcctgagcaacatggtgaaactccatctctactaaagatacaaaattagctgggcatggtggcacatgcctgtaatcccagctacttgggagactgaggcaggagaatcgcttgaacctgggaggcacagattgcagtgagcagagatggcgccattgcactcctgcctgggcaacaagagccaaactccgtctcaaaaaaaaaaaaacaaaaagacaaatatataccagataaagtcctccaaaaaaagagccaggaaaagagaaaggagaccaggagggggttgcatgaagaaaatttagtattattatccagtattgccattgtttaacataatttgagttttaatcaaaatttacatttgcataatttaaaaaaccaaataaaatgtaaagagccctgccttatcattttcctaggaatttccgtgcttagagaaaacaccttcaactcctttagatgtttattctgggctttcatgtctgtaattctgggttttacatatatttcaccttgatttttaaaatgtagatattatctattgtcttcctcctatagaagatgaatgtttagctcctttcacctcctgcttagcaatccctttatttggttaaatcagtattcagagatttctttattatgactatataaatttactgtacagctatgccatataatatgatttgactatattttctttgctcaaaaaatttgtcttccttagtttttcaggactctctttggcatttctaggaaacaaaactctccaagggaactctgttcaagaaatctatcaggttttgttttttcccactagatatatgagtgggaagttcaggctggttgatctttagttctgttgcacagctatatccaagggctaacatttgctgctatactagggatttccttcccctgtctcctatgttggatcctccatttcctgaatcctacacgttctctcttcttggtttatttgtgtatttggtagagcacatgttctagtagcttctgaaaaagaatacaaggagggaagtaatttgaggagaaaattttgaatatctgaagtgtctttattgtctacaagtgtctaaacataaagaacgatttgaaattttactattatatgaaaacttttcattaaaaaaatttaaatggttgtaccattagctgttagcaatgttaatcagattctttcttcttttctacttttttttttttttttaacgacctggaagtttttaccatctctatatccctgggcactcagtggacccttttgcctatcagtgatggttcttatgttctgagaaaatctgcaaacacattcatagcaacatctagactcatgttcgaccaaacagttggacaccaagcctagccaagttgatgcataaaatcaacaatcacaagcaacctttcacataatgcctgtttacatacttgttgagtccagactttctttagtttaacttctaaaggaaaagcttactgcatcttcctgaagtgtaagagggacaacttcctggttggggaaggtatttagcacaccttatatctgacttcggaaatctctggggctttcaattccaaacctttctgtctagagttacacaacttgaataaattagcttattgtcgggctctccactgcaagagcttagctttttcttataggtatctataattgattgtcatttttctccttctctcttttttttttttttttttttgtttatttcatctctggggatttcaggagggaaacattattcaatctaccatgttttactgacaatgttcccctagtgtttttgaggttttaatcttttcagaccaaatctttgcagacatccttgagccctctcttttccccacaacctttgtctcatctaataaaaccaattctgctgattttaccttcaagtatatccagaatttgaccacttcttgccacccttacttacaccagccaggtccaagccaccttcctctgttcctggactattcaagtagcctcctactcccctttatctttcttccatcacttctcaacagacagccaaagtgatgctgttcaaacttgagtaacatcccatcactccaccttccatttgcttttcaccatagctaataagaaacaaagttgatattctttaataatcctcatggtctataatgtccatgaactctctgacctcatttccacaagtcttcagatcatttcttcctctccagccaacaagcctcattgctgtccttcacaactgttcaatgctctatctcaggcaggtataaaagtacctccatagcagtgctccctatatattttctgaattaatggataattatatttcaaaaatacctcagtggcattctcctgtttttaggtgtgagcctagcaaaggtctgtggtgtttttttcacaacacttacgaaaagcgttgtgttcaaccttgcaaatgaggaaaaataacagtgacctaagtatcatatattttttaacaaaacaagatatagtctgcacatattcatagcccacgaaaagagcaatgtgtgctttggggtggacatttttttattttttattttttattttttttgttttgcttcagaaattccactttaatgtttttttttttcctggttttatggtctcttacagtaaaacttgcattgaaaagagaaacccttatcctgaagtatctttatcataaacagatgtttgcagtagccagccctgcaatgtgcacagtaaaatgtgctgctacaatctgaagctttcatttacttatttaaacatgtctgagagacctagatcatataccacaggggcagacagcatgctggtgtgtgagcagtggggcatggagggagaaggatggggtaggaagggatgagtagcaagcttaaggacttctgcctccctttcatctgtgattgcaaatactgctgacccatagtagatgactgcacatagattcttgtcccactttcctaaaaaacattattaaggaaggtgcatgtaatgaaacctcatgtattattaacctaaccttactacgaatgtacaaggaataggtttaattcaagtaaaatttataggcaatttgttaaagcagcagtgcacattagaaggtacattagagacacattggttttaatatgccattcaataacttgaacagaggttaaaaatgctgcttaacctccattaagtattttaaaaatgctttaatttaaaattatttggagtgtgtgtacatatatgaatgtacacatatccacactaataaatataacactaaatatgttttcccagttccctttttcagtgctggatgaccttataatgttcagcagtaggcacttaatcagaggccaggccgaggaaggcagggaaggatgtcaacgcatcccgagccagtgacccacccttgtccttgagaactagaggcagagagtgcatattgaagactctgtagctttggaataaaacaaaggctaatttataatgaaaacagcttcctatgacatgttttgtactaatagggcagtgcctcctgcttccccctagtatttacttttggttttcttttacaattcataaaacaaagtatcttgtttcattaagtagcacatcatatttattaagtaatgagctcataaactagaattgtgtacaagaccctgccaatggaattggaatcagatgctgatgttccattaaaaatcaatgcatcaaagttgatatccaattatgccacatttcctagtgtttggtgagacaactttctaggttaacatgtttttcacagagagacctgaatctaaaagtaagaacctcttccttgataaatcatcaggaaggaatcttgtcacaggaaatacagaccacaatcttaggtacatctggaaaacaaaaaaaagtaaaagacactgataagaaaaatttctctgtcatagaaaacttgctaattgacaattacaaagatgataatagataatgtttactgagagtccgctgtgtgccaggctctgtgataaggttttgcctgcaaactttcatttaatatgcacaatatttctaagatggaggtgctgggattattctcattttaatctaattgggggaatgaaatctaattaagtagaagagccatttataagtccaggtccatctgactccagaatgtatactctgaaagagtggaactttttctttttctttcttttttttttttttttttttaagacggagtcttgctctgtcgcccaggctggagtgcagtggcacgatctcagctcactgcaagctaagagtggaactttttctaaataactaactcaatatttatcttacacattcacacaacaaatatttgagggtgagttagataaatactgtttatttcatccactttcaagcatacctcaactcatgattctggcttactgcttcacattctgggatacctcatttgttgttcaaaacccaagtagtaggcataaaatgaaaattaacagagtcctgggaaaccacagagttcaaataatgatgaggtaaattgaaggggtctagaaatggaattatctccgagaacttagttggagaaattctggagatggttggaatggcacaggagacaggctttagagcatgcatttgataaacactgaatgggaacagagaatataagttttgctgtggattttgaatatgcatacacatacatatattaattataatctccaagatgtaatcagagttgtcattatttgggttatttgttgttattggatttgattcttagagaatatgttaatgagggcctttcatgggtattcacataaatagaaaaattggattatttatgaaacagaaaattccaataatgttttcccttacatgagcatattattatgtcctttgtttaagagctaagatatagttttagggtgacattttctttctgcagctctgttccatctgttgctgtgacgagcactatattttaaatttattgtgtctgatccatatacactcctctctagactccctgataggacaggccactctgaccaaccactctcatgactcacagatttatgtttaccattttccttttcagtgttaaagggatcatctcatattttagaggatagaagatatttatccatctatccacccattcatccattcagctatctatccatttcattcatacatctgtttttcaataaacatctattgagtaaattaccagagactatgttggtgttaaggtatacaatcacaaatatactaagacattgtgatttagtaggggaaactgactcacatgtaaatgtatcacaatgtgatgagagccatattagaaatatacaatatagagaagtagtaaagtgaaggaaatgattaattcttgaaggatgaggggtcttaggaacttagagaaaatgatttctgaactgacttttaaaaggaaataggaatcagcaagctgctcaagaagggagtagcagcccagaaaaaaaaaataacagcagaacatttaaagcatacctaatttaattgaaaaacccttaaaaattgttttaaaaaagagaaattataccttgggatgaataatattaatatttatgtattcacttgatcaagtctagaagtaattttagcgtgattttatataaaactaccaaatggaggaaaattattattgttttaatttgaaaactaccatcatcaactatactgaaatatagtttacaaacaatacaacaatattgaaaatattgattcataaagccattaccaagatagtcttttgttgcatggatataggtgagccacccatccctccccaggctcttgtgtaactattatgtccattttctgccttaaggtgagagtagtttcttctaaatgtcttacaattagtgcttagccccagcattgccctcctttcttgaataaagcctagaggttacacttcttttctttctccctctcaagaccttggcaaagcctagttgttcatggtcctcaggagagacattgctgggaaatgggctcttcttttatgcccaggacaagtactgtgctatgcaaatagccgctgcaggagataataccagctgccttgctaataactttgaactctgtagattcttctcctaggcaaagccacactattttacaatatgggtgactctttgttttagctggatgatacatttttttccacttgagatttgtcatgtctaaaaccaagggtcagctaaataatatgggaaaataataaactagcgagctgatttggaccatgtatatgtgaactctcagcactacgtaatgcaaggtaataatgttgtcctaatgaccatgcttaagaatgtggtacaaaatcattcatggaatgaaatctcaatatgatcagttacaatgctacagatatataaagatttggaacatgaagaagagctaacaaaggggtatcagaaatgcattacattaaagtaaattgaggtcagttataattaagccacattcaggagttgatgtttaagtggaagggaagggaaaagattgttttctatagttggaagtcataaaaggaggtaatggtctagaattaggcacattcaggtaaggcaagaggtaatctttaagcaggaagttacctgagtcatcctaattagaactgcttaaaaataggacagctaaaatactggtgggattaacctttataatcaggctcctgagaggaggaggggaattaaccccaaggcaaattcccatgcagtcttttcctggaagccctaccttcactttcagtctccctaggtgctttagcatctttttagttcttctctgcttgtacttctgatttttctgtgacattctttattccccaaaacttggactacccaacttctgcaccaaaatgctatcccctacttgtacttacaggtttatctaatacatcatttcttctaaaaatcacccttaatttttccaaattctctgtggcttggagctattgcagtaagtctaaattaattctacttgtaagtatctgtgctaatgggtaatttatccaaattggagagctgttagcacattcatgatgccatcatcatggatttaagggcctagataccttcacaggaagaaaaatacaaagaatcacaaccacagtggccttgaatttaaatggaagccttctgaatttgactttgatcatgtgatgaatcaggtacaagaatatatactaattgtcatggccatgctctatttctggatatgtatatataagggaaattgctgtcaggtggtacaaataaacaaatagcgtaacctggctgtaaattatgataaaaatgatagtattagttgatttccgccaactgaatggcacatattttgagctctttcttttcctctcattgagcacaatgttttctattttgctgcccttgaaactttgtaagacagaatgtataggatctaggggaaggaaaaaaacccaattgttggtaactataagaaaatggcttgttttcaacaagagcctggaatgagttttagagtatcctaattactttttgctgttccctatataatagataagagaatagattcactttttgctcatgctctccttctttcaatatcattgctattttatgaactttaaattagtgtcatgacaattgtacaattcatttttatttgctgtaactgtattcattagaatccttctgtgatccttctaccccattgtttcagtaaaattctttgcagcattttgcacgggcttgtgtgtgtacccatgggtctgtgcatgtgtgtatatgtatatgtacacatacatgaacacacacatcacacaacactaagaaccatttctccctcatatgcctgctccacattcaactgcctgataactttctaattctataacagttaacttccatctcctgggtctgaagagattttaagtaatttgaataaacttttgaatcatatttgtatttctttcctttttccataagaaaaaaaatatgagttttagaggtaagctaaagtctctaaattctgcaggctttttttgtgtgtgtactacttgcagggctcacagcctgtttaataattgaactcatttttatttgttcatcgaatgtgtttggaatgcctactatgtgccaagcagtgtactggctgctagggagacaatgatgaatgaagcagatgggttttctgcccttatggaagttagattttggtggaaatgagattgattataattttcatgaacacttaggaaacaaacaggatgctatgcatttgtaacaggtatacctagcctggcctagggaaagttgcctgaggaagtcacgagacctgacttacatgagtgaactgagcaacagagataggtcaaaatcatcccagcagacagaacggcccatgaaaaggcctttaggtctcaagaagaggaacaaatatgactgcaatggactgagcggggggatgagccatgagctaaagctagagacgtagctgggacctgactgtaggattgaaagctgagtgagagatttggatttatttcctaaagggaataggaagtcatcagttagtttcaaatagagaagtgaaatgtccaaactgcactttggaaaaagactgctacgaagaatagattggaacaggacaagagggatgcaattagaagagatggcctccgggactgggtggtctgggtgtaaacctgggttttgctatccattaactctaccattttaggaaagtgtgttaaccttctcaatcttctgttttccaattgacagaatagatgtaataataattcatgcattatttgcatttctatgacaactaaatgagatgctcaagataaagcccctacagtagcatctagtttgaagtattagttataaaaaaagtggttggtgactttatctgggaggtcgtagcggggatgaagagtggaaggtttaaaattgttaggaggcaacatccataggacttggtaattagcaaaatatagggggtcagagaagtggaggatgcaagcttttgttttagtaaaatacagaattagtttaatttgaatttcagataactttttttagtctgagcaaatgctgcatgggctgcacctttgctaaaaaatttcattatttgttagaaattcaaatgtaactggcttcctatattttataagtctgccctaccaaaggtacctcagtgttctaggcaaagcaactgaatgactggtaatatctgttggaatggagctgattagaggaggtcaagttttttgtagaaatattgaaatattgcatggtagattttaaatacattgaattgtaggacctgggaggcacccaagtccaatgtagataatttactcagtttttctttggtcataattgacacactgaaggacagatataaccacatttgtattgggaattagtgccttggtagagtattctgtttttctgtgtaatcaattattatgctttaaataaaagagtggataaaaagtatatataaaacttttaatttctttatttctaggtttttatatttctccaggcaatgccactggctgcctgccatgctcatgccatacaactggtgcagttaatcacatctgtaatagcctgactggtcagtgtgtttgccaagatgcttccattgctgggcaacgttgtgaccaatgcaaagaccattactttggatttgatcctcagactggaaggtacatctttataagctttaataatttaactctttctttagcaacagttaactttttttggcagttgcaaagcaataacttctgtaaaaagtattttttttgcccggcttggtggctcacacctgtaatcccagcactttgagagaccaaggcaggcggatcacgaggtccgaggtcaagaggtcgatatcatcctggccaacacggtgaaaccccgtctttactaaaactacaaaaattagctgggcaaggtggcatgcacctgtagtcccaactactcagaagtctgaggcagaagaatcgcttgaaccgggaggggtaggttgcagtgagccgagatcgcgccactgtactccagcctgggagacagggcaagactctgtctcaaaaaaaaaaaagtgtttttttgttattgatatgttttttgttccgtgacatccacatttacttaatgtatgctaatctttgaatatttcctagagtgggttgctatatattgatagatgtggcccatcctagcatctgggaatgttgaatgagataaaatatattttctctcaaaaagctgagagtctggatgtggagaaagacaggaaaagacatatctgaagaagaaaatacacatactcatactttctctctctctctctctctctctctgtctctctgtgtatatatattatatatatatattatatatataatatatatatatatatgggatatatgtatgtgctttgttcttcattgcccttgaatttattgcatatttattagttcattgcatctatttatattttccttgcgtttctaatttagctttaaagactggcagatgagaaacatagctttgtattctgtgatatgatttttttcagtatgtaaagtatattatgaaagtaaatcatttttcaaagttacactctctttaatattctacttcttattctctgggtatctgtggccatttgccttcactcatttgtgtttattgctgtatttttgaagatgtgctataatgccaattctgtgtctgtgtgtgtgtgtgtgtgtgagagagagagagagagagagagtgagattatgagcttgtctaaagttcagactaaatctatgaattctttgaagctcctatccctgagaagctagtagtgtgtgctgaactcagaaagcatgtaataaaatgagtcaaatctgtctctcaatatgtgtatatttataaatctaattgctaattatttcagggtttgtgattatctgggctcttttaaactcattgcccccctgctgcctgccttttggctgttccactcctcattaacacctccattagagggtggacaggtgacagggtaattactgaaaaagaacttaaactagttcattttgactttcttttaaaatttgatgtgatttttaaaaactacaaaaatcatttaaaattttattaaaataatttttgttttcttgacatacatgcatatattttaatctgtgacgctctacttctatcaccgtagaaatgttaccttgatggtctgagaccattgtgactcttttctacagatgttattataaatcatctaaatgagtatacaaagcgcatggtacagtaaatagtaaataaaaagcactgtcaggattttgatagtaaaataggagccagttactgcacatactagctcctagatgtaatttttttgaaataatattctacagattccccagttggaactcttgggctggtttgtttcactcctggccacctctgtctttttcatagttctgaccacatttaccaggagaaaaatatcttccccaacccactgtcctccttgcaacactcattcccatcagtgccattttgtgacattcaattacccatttttgttctactcatcccctttgtcagtcttcccagggttatcagcaaaacgcctgctcagtgacctggggatgtctgattgtctcagctttttcacttaactttttttctttaagtgagatctgattcccttcattacactgcttcctctaccctacaatgttcttaaattcgtggctgagccttttaccccattctgttcctctcccattatctacccatctcactctcactccccaccttactttagtccaggaacaagaattgcttaataagtactgttccatcacctgtcactctgcagtaggcctgactagcactggagctagattccctgggttagaaggtggatttaaatgtttacataaattgataaggaataggaaggaccaaagaagtgggtataagctacatttttagaagataccgaagttacaataaagaaagaattcagtctaggcactatggctaactcatgtaatcccagcactttgggaggctaaggtgaccagatcccttgagtccaggagtttaagaccagcctgggcaacatggcaaaaccccatctctgtaaaaaataaaaagttagccaggtgtagtggctcttgcctgtagtcccagctacttgggaggctgatgtgggaggactgcttgagactggaaggtcgaggctgcagtgagtcaagattgtgccactgcactccagcctgggcaacagagcgagaccctgtctcagaaaaaaaaaagcaaaaaagagagagagaaagcagacttcagattcgcaaaaagaatgaggggcaggttggagtctagaaaatagagctaaagtatgagaagctgagtagatttctaaaaatatgaatgattcagattaagtgtggggttttttttttggacagagtctcacactctgtcgcctaggctggagtgcagtggcgtgatctcggctcacttcaacctctgcctcccaggttcaaaagattctcctgcctcagcctcctgagtagctgggattacaggtgcatgccaccatgcctggctaatttttttgtatttttagtggagacagggtttcaccatgttggtcaggctggtcttagactcctgaactcgtgatccgcccacctcggcctcccaaagtgctgggattacaggcttgagccgagtgtgtgttttaaacaaaaagatccacaagttttatataaatgagtttggatatctttacatattagttggctcctgttatattgatgggggtggtgagattacctttttaaaattacaaattgtccttggaaatggtcgcacttttcttccatccctgtattagtccgttttcatgctgctgataaagacatacctgagactgggcaatttacaaaagaaagaagtttacgggacttacaattccacatggcttgggagacctcacaattgcagtggaaggtgaaagacacgtctcacatggtggcagagagaagaaagcttgtgcagggaaactcccctttttaaaaccatcagatatcgtgagacttatttactctcatgagaacagcaggggaaagaccctaccccataattcaatcacctctcactgtgttactcccacaacacatgggaattgtgggagttacaattcaagatgagatttgggtggggacacagccaaaccatatcaatcccctttgttcttatctttccagttccaggttttccttttcagagggattctatttttctcccttttctaactcctgccattattttaaactactttgacatgtactgatgcagttctttggcctcttcattcattccccactccagcaacccatttccatggctacaccctggattttgtgatcacttataatttctctatttctcaaatcttcctaatcccatgaatgctattctatggatatatcacatctttccaattccaattcaccctggaagcctcacataacctgctccttaacttctcttaatctttatcccattatccctccttaatcctcttttgatcaaccccatccctaacttcactgtcttctacttctagcctgaggcaaaacctttttaattatgacccttttgagtacctgattgtgggctcccttctgctgtactgtggggtcagctccagagacgatcaccctacacctgccctgatctgtgaggacgtggggaaagatcatgtgcctatgctgatctgaagcactaccatgtatgtacttcttatcaatttactttctttccccctttaaactcctaccagtctcctcagttttaattccatgctcttgcccttgcagataatctggccctctgctcatagacaaaataaagccagatatatgtatctccagattatcttttctccacctccagcttgtctacattgtcacacatttttaattttttatctagtcttagaagaaaatcctgtgtatttttgcctaaaaataacctgttcccagtccttgatatgatcccttcctgttttcctactcttgttcctccattccatgatctttgctccatcaaatcctccctttattttaactcaaacatctctctataggtaatatcataactgcctacaaaaatgctattcattctacaaactccttcctttgattctgccctgctttatgagccctgaaagttattgtctaatctctcactcttcattcacttactaacatttaaaaagagcactatgattcaagaaaacatgatttaaaaaataaaagatcagattttttttcttcttcattttgtttctttctcattcattctttattcaccatgtgtggtacatacatgttagcagaacatacaagttagcagaacttgcaacatgcagacattcaagaactagttatgtgactattaaattctcatccaaatcaaagacaaggtctataaagagatataataaacaaaaatgggttaaggaaaagacagaatgagggaacaggtttcactggtgggaaaaagggaggggtcagtggtgctttccacttgagtccagtgagaaggtcttatttgatcccttgaagggtgacatgtgtctcctgcagttggagagaccagtgcattgatatctatcttagacctggcaaatctaactgagaagagacagtctacccaggtttggataggtaagctagaagacagtgccctgcatatcttagactcccagagttcatcatgacaaggaagactacgtatttctcatgaccggatgaagaccacaaggaagaaagacagggtaaggttgtcttagtctgtgctcaaagtaccacttagaagataaaggggcctgtgtagaataaaggacaagattactgtggactacaggttaataagcaaccagtcgaaaagaaaatgcatctgactgcactaaaacaaaaggtgagagatacctaatggtgagaaagatcaatgaagaagtcaggaatgtaccactgtcagtgataagtcagttttatgtatatgcaggaccagagacaatagactgctttgggtggttctagtccaagtgagtttctacccttcctgcagcctctacgtgagggaggaggctaaccaagctaccttctctgattatagacttgctgcctttatcatgtcctagcttgatgaaaggaagagaagtatgttcttgaaaatgtctgttctttaaataaagattggaatgttgactaatatacaggattagactttctattttctgaattgaatttgtattttgcaatgtaaagtaactgtaggacattctattgcctgagaaagaccagaaaagccaagtgactaactcattttatatccacatggaacatgggggaattagctccatattatatgtttaaagggtcagtgaaagacaaaaataaaactgatttatgattgcttctcatgacttatggtttctcaatgtgctggtcatttcattgttcccatttatttcttaaaattacctcttcctttggtttccaagattctacttctcttatttgttttctaactctttttttggctactcctttttaatatgtcctttcaatttccacaactgtgtccctgatttcaaccactacatacatgttaatggctttcaaacacatgatcacccattcagatgcctgccacgcactctaggcctgtagccagctgtctctctgagttttacgcttgcaagtccctcgtgcatttcatttttaatatagtcagcacagaactaaccattacttcctcatctccacccaaataaaaataagtcttatgccatctcatgctatcatcatcttggtgaaaaagacgtaaaacttcaaataattattcaagtccaaacttcccaagtttgagtggggcttagattcttctcaggtttggcagaattggctctgttgttgagtagaatgagtctacaggctactgctggaaagtgctatggaaagcaagagctactgtatataatgcagcttctctaaaaagaatagaaagaataaagcttcccatggccatatgggacccaaggagatcagcaggatttgtctcttactaaatcagtcgtgtggaatgctggtaacttgacttgaccctcctatcccactgatgaattcagctgtctcttttcacttcaacattgataatcattacacaggaaatcctgtagcacagaagggcatggagaaggatattttaaaatgtgacaatgagaattgcttgagtttggacttttgttcaacattgaaaagagataaaagtgggttctttttaatgtttttccattcctcttttgaatgataccgttcttgaatctttttttgacttctggttgttattgtatatacaccaacattggctatattgaaaatgtgtaacaattgactaagatatatgggattccatcaagtataagaaatttttgttttttaaaggaaaaaattcacatgtaatgtaaatatatacagatatgcagtataggaaaacagctatgtcctaatgttaaaacaatgtttttgaaaacaaagtagattcaaaatcatttgaatctactttgaaatctaggcactgtggtaggttattacaaatagaaatgtttacatttataaaaattacattccaattataacaaatggaaattaaaacattaattttcaaaatatacagtagattataagtaacttattattatgaaaggggaagatacaagtatcatattatttcttcatcaacttggaaaataacctcacttccttatctgcctggttcacatattccttaccttcttcatgctctatttgttggatatagcaaggtttgctatattgttttctcttggtttatttgctacacagttttttgtattcccaagggcaaaataaataaaataaaatagacctcggccctaaactacacaaccaacaacaaaaatccaggcaacacaacaatgactttttgtgaccaagctggaaaatcatttgcctgtttccatctaagtggtttattcttcaaaagttactgaccagaaaaagggggcatgtattttaaaaagctgatcctagtgcaaacattactccatttacctctgacacataaagcaaacatgatttaatcagtatcgaaaacaatgaagcaaaaaaaatctgcccactgaaaaatcaataatgcaaaaaagtatatagtgtttgtctaacccaaaaacaatgagacaaaaatgggccatatttaattcatctcagttggtagtggagacccatatttgacaccctgcacttactggcactgtcctcaagttgacctgtgactatgactactctcccccatagcccccaggactgctccagttcatctggtaccccacagttttcttacataacaaccacacatcacaacccccaaaagtttcttccctaatgatataccctctctatattctatgttaccttgttttaagccttaaggagttagtggtatcactatttgtcccatttactagctgacacacactgaagttgtccatagagggtaggacaccaaggctggttagggagaataaaggctcagacttctggagcataaaatacagggaagttcttctatgcccagattatttttggttttactgcaaatgttctacatttcagcactaggttatagatttggtccagtaatcttttcacaggcctttatccgattgatctcaattggtcttttctctgagaaccaggtcaatgacttcagatgaaagcagataacttccttgtcaactgatttccttttatggtgtgataatggaaaaattagggagtgtgcctcatagattccctctcctcagtgactctttgtcagacagctggctgtcatctggggtgacagggtaaatgggccacaagcctgtcatcatctggcagccaaggcagggctttctcacaaggcagtggcagatttccaagaaagaaagcagaagcatgcaaagacacttgaggcccgaaccgtcaggatgttacttttaccttattctactggccaaagcaaggcacgaggcttaaccatgtttggaagtggtggggaataaacagactctccttttgatgagtagaactaattatacagttagctgcaaaggacctgcacagagggaaaggtgaagagttgtgatttttgcaatctcctatggctgccaaactatatattctctcttagtatagatgatatatgatctgataagaagtatcagtttttatatattagtagcatttattcaacgtgatgtaataggaataacatgcaactggacatcaggatatccaggtttcagttttgtcttttccactagaccagatacagtagcttcctattattggtggaataaattatctcaaactcagtggcttaaaacaacatgaatttttattatcttatagttctggaaatcagaggctctaaatgagtttcactaggctaaaatcaggcctgtgtttcttatggagattctaggaaaaaaaaaaacatttccttgattttcccagcttttagaggcaacctacaatctttttttttttttttttttctgagatggagttttgctcttgttgcccaggctggagtgcaatggtgcaatctcggctcaccacaacctccgcctcctgggttcaaatgattctcctgcctcagcctcccgagtagctgtgattacaagcatgcagcaccacccccagctaattttgtatttttaatagagacagggtttctccatgttggtcaggctggtttcaaactcccaacctcaggtgatctgcccgccttggcctcccaaagtgctgggattacaggcgtgagccaccgcacccatcgtacattctttagctcatggctccttccttcattttcaaagccagcagagcagtgtttccttggacctctgcttatgtccttacatgttttctctctgactcttaccctcctgccttcctttataaggaccgtagattacattgggcattcttggataatccaggataatctccccatctcaaaatccttaaccacatctgcaaaattccttttaccaagtaaggtaacattcacaagtttggaggattagaacttggatattgttggcgtgggcataatatgacctgctctaccagagttcagcaatctatagcctgggggtcagccacatgtttatgtaaatagagttttattagagcacaccaatgttaattctttacatattttctgtggttgctttcctgctacagcagcagagttgagttacaatagagctcatatggcctgcaaagcctaaaatatttactatctcatcctttatagataaagattgctgaccttgtaactagatttactgtcaccttggacaaattagtctcactaagcataatagaatcataactttatagactgggaaagaaccttaaaagtaattttggttaaactctaccctatacatttctctgcgtaaatcaccttttcagaaaaactggtgaatggccattcagcttctgctccaaaacatggaactaaaaggagctcactgtctcatgaagtagctcatgtttatttcaaacagctgtaattcttcaacaaatagaaatatattatttatattgaccaaaaagttgcagtcttttgactttcttgcctagtcttatttatgccttctgagaccatagagaataagtgaaatctctcttctatctgtgagcactttaaaaatttgattctgctatcatatctgaaagttatttagttatttgcataaatatgtggagtgtcaacaaaggagaaagagacagtgttctcagatcagaaccttgctgagcaagctgcctggacttagctgtcactattgcatggatgcaagggagtcactgcccctggtccagcttttatgagtttctctatttgtgcctgggaaattcaccaaagagggtggggttgcacactgttaacgtctccctttcagatgaggcactcgtatttccttgttcaataagccatgtaaatatggctttcagttcacacagcgtggatgcccaagcctcaaatccctctcctataattctgattccatctccaagagaattcagatgctgttagtagtctgtaactaaagcgaaactaagaagctcaatgaaaccacagctcctctgttaatcggggaaaaccaaactcctctagagggcactgtagcactcaccgaattctgtgaactgagaacactggtttaagagaatctgaacagataccagctcttaaagaaaactgtccattccctgggagtgaggttagccagggggacagagttaagccaataaaaaggggctcaaaagagctaacttgttactagagctacaaaccatgtttggattaatctccggtgtcctatcctaagtctaaagcttccctggtgctttattcactattaattcctgtatccgacaatatttactgaatccttactgtgtgctagcctttgtgttagggactgatggaaaaaactaagacaaaaacaaacaaaaaaactctgccgaatttctccaatttgccttgaagtctcattctcttttgtttattaataatccttatctaaaatcccttagcaattggagatctctttctccttcgttctttatgttgaatgatgtcttcatcatccccattagcaagttagaagaccgggagtaactttatacctatcctcccttctcttttcaattcggcctcccattctaccaattttacttaacatttctcaggtctatcctactcatttccattgctccttgccactgccccaaggtagcattatcttacttctgctcacctttccaggtttatctatcaccatttctcattatgaatttacatccaggagtactgaggtgcttgcaatttcataccctcttctgctttttcttttttttctctatttttgcccctccccgacttccctggcttatttctactcatcttttaacgttcagcccaagcatctcctccaagacttctacttaaaattacccttcccatcccttcttctgctaccagactagttaagttgccccttttctggacctttagagtctggatacatctttattaatgctgtttccgttttttcttgcatacgagattgtgagctccttgaggaccggggcaattctataagattcatctctacatccttgatgtttattccagtcctggaacatagctggccctcaatgaatgttatttatgtcaatcaatatttaaatcaatttgatagtacccatgagctgaggccccatagagaggaggggtgtacaaagagaaatgtcaataaattgacctatatatcttgggatatatctctgggcctcctacagcagttctccctcagatgatgaattttctgacaatgatgtgcattactgaaacatattcctttcattaatagttaggtttcaacagtaataattaggataaccatttctctcactgtttccacaactggaagaaattcctaagaaaggaaggtatatgaaatttgtgatgtaggagacagaggccaacttctttcccattgtaaccagcaaatactgagttatgtaagggtccaaagagaactatcatagcaaagtgctggcagagattagtgatgctttactcctgttttgtttaccataatgaactggtcaataaacatcacaaattgtttatctatataaatcttgacagattactctttatgaaatccatttagcaagcgaggttttcccataaggatgaaaaatgaagattttaaacagattgcgggagaagctctggctgtaccaagagagtcagtgtaataaaggtttctttatattaatattacaaaaaccatttatcctggcaaaatcaatattgcaattcatcttagtttggtgtttctctttctaagcttaaaatgtcttttcctttattatgtataattttgttttaataaatgtgaaatatatttcatttaggaggtactcttgaggagggataacttataaaatgacatcaaatttgtagcttatttgctaaagagtcttggaagtgtttaaaattatatttgagtggctgagaaatctaaaggaatcattttgcttaatccttaattacaaaattatccctgtgtcctttggggtaaaaacaaactacaattttcagaaaagtcttcgcttgtgaacttcatttaggaaaaattctctcttactgaagtcaagtgattataacaagtcagataagttgactataacaatggcttggataagagactataaaatcaagaatagacacatttaattgctcaaaacattgcgtgctttggctggaagaaaatagaactacatcaaggaacggaattatgttatacattggaagctattactctaaatgtactgtatgtaaaataagtgtgattgtctcatgagtgaatggtaataaaaactgaaatactcaagagacacttattcatgagtggtgcagttacacatacatatatacacacacacacacacacacatacattgagagaagcttttctcttattgtttatgctcactaatattatattaaaagcctataaacaatagactctacataatagcctataaagaaattaagagcaaatcaagtatttttgcatctataattccattttaattataatacataattttcttcagctctaaaacttaacctaaacaaaacatctatttgaaatggaattctgatgtaatgtgtatagataaaagacctaatatagttgtttgaagggggaaaatgtccttttatcatgaccataaaaacggcaaactacagtacagtggttttcaagaaaaactgtactttatttattcccaaggggatattagtccataaaacaaatttgcagcttatttggcagtcttagcttttatcagcctttttaagggtgttgaatgattacccaagagatcacactgtaaaaatggcagtggggaaaagtaactccatccgttcagcatctttattagaatatataggtgaatccatttgatgttgttttaaacgtaccacaaggagagtaccttttaaatggtgagtggtcttcttacatgtgctgttttgcttctctaatacctcatggcaccaacgttgcttatcctaattagtgccattggcataggctacatgtttgaataattcactgtgaagaaacaagttttagtttctatcatggcaaaatgccactactggtatttttacaagcaactttgggtccaagaaatttaagttgcactaaagttatcttactatatttatgtcattagcatcttttcataaatcagaataatgctgtattctccaaccattatggataactaagtttagttcataaaacagaaaatgaaatataacccatattaaggcatcaaaaatatttgaacctgtctttctcaagcaattttcttagtgaaatttagtcttcatcgaactaactatagaattttaagatttttagggagagcaatgatttacccctgattttctatttcgcaattggagagtcacttgaaaagataattttatgggtacctaatctaaatgtttagctgacaggaacactgcttttgtaaaagcaaaatttacagcattcttaattgaacaactggattcaaactaatccataagatatattgtgggatgtaaaaaagcaatataatatctttttttgctattaattagtttataaagagaaagctttatacgggttttaccaggaacagtagttttataaagatcttttctattttcctttattttatgttgattctttgtttgtttagctcaagcattcttttcaatatattggctaaaacaagccgtcttactctacaatgctattggtaggtgtaacttatactatgaattattaatcaaaacactattctctttgatggtttatttgccttgttttcagatgtcagccttgtaattgtcatctctcaggagccttgaatgaaacctgtcacttggtcacaggccagtgtttctgtaaacaatttgtcactggctcaaagtgtgatgcttgtgttcccagtgcaagccacttggatgtcaacaatctattgggttgcagcaaaagtaagtgaactctggttcagtgctggtgtgtgaagcagcatcatacaggggactgcatctcattgttttctttctccatttagaacccatcagaaaggcttagtacaatgtgaagaacgtaggtaagagatggaaaaaaatacactgaatgaaatatgtctgcttttccttgattagacaattggaaatggtaatataattatgttcatggtgggaaatttacaatagttttttggagtgaaatcaacaatgaggtgattaaagtcctaggttttcccagaccaagggtcttcccaggacacaagacttttaatggtaaaatcaggactatattggttaaaccaaaacagttggtcaccgacacaaagacatttccaggtaagttatttttttttgacaaataaagggtgaattcttgtttattatatgtttgatattcttccatcccccaaattttgtgggcagtattataccattagttgtttatcgatattgtaataattagtatcattcgtcacgcatattattcatcccataattcatgtttctttctactttaagtttcactcatttaaatatctctcacatttatatttttaattccttaaagcctaagattacatgtaagtatcttttgacttttcaacatcgcttttcagtaccttgaattgacctcacaaggtcacctgcagttctacaatttcataacatattgaccgttttcctatatttacttcaagatcatacatccttaccctttccagaatccctaagaaatgcctgctgggaacatgtggtaggagccctctacaacatattgtgctatgcatattctccttggggtgtcctgagactgtcatgagtcacaatgataggaaacgccacaagtcatgacagatcatcacaaaccagcatgcctggaactctgctatctacatttaaggggggagggagaaagataagtaatgggatattggactccacaacaactgtactagattttgaggtaatggaaagcaggatatagctagtgattaagaagacgtattcatattttgtacctgtgtagtttctcttcagcatcccgcatttcatcagtccctctggatttcagtataagtaaaactgtaggtatttatgcttcttttgggaaagaactgtcataattcctttcatgtataaatacagtctaaacataaatctggacttcattggccacttaattactatgtgtcatttattgattagcaatacaattgattgctttgtatgcaacaaaaattctagcatattccttttggatatgagttatggatcgtcatttataatggaattacaatacctaatcttagtgatttctgattggttctgccactaattttgtgacaatattggcacctgctctactttttgctacctattccttcttgcatttgagacatagtctgggaattatctctcaggcaaaactggatagtcatgtcactggaaagctagcctacaactcttagtagtggtagacatttaattttatgttttattaactggacattctttccaagtgtttctgatttgttagaatttttaaaaactctcacattcctaatgattcttccctggacatattccttttggttttttatctctttaaaattatgatatatcatactgagcacagttcttcaactcttgtggttgttgctgcttctgttttaggtttttatttaacaaaatttttgaaacactgtgtaaagttggaagctcagcatcagcagaggcaatttattagaaacaaatgagacaactttcctgccttcagaggaggtcaaaacatagctagagtgatggacactgataataggaggggagcagaaaaatgtaaatggtgggatgaggatgaagggtcccagccttctctcctgttccagcttgattttcacatggtacttgtgtttgatcctagcagaagccagccagaacaattggcttcacaaagatatgatgaaattgaaaggaatgtagtgctatctattgctgacacagtgaactacctctgactagtatttgtctctgtatccaacagatgtcaagaaatattttcatttaaaattaaaatttctcatggtaccccaccccctacacagtttgggaactgcaggattataaccctcattatatcttctaggggccactagcaataatttagtaatatcatctgtgatttttatttttggtgggctgtcagggtgggaatcctaggatgtaatttccaaaatgcaagaggattgaatgaaaataaagtagttagaccttttcttatagtaaatttcccttttgggtgattcacttctttcctttaaatattggtatcatgctttcaaaatgatagtcattcttcttgataggaagcaaaacaagaattaacataaattaaatagtcctattttctgtatgctttcctagcgaatgatattctagttagttcaaccatctatgaacctaactaaaattatacacatacacacacacacgtatacaattagccacttattgtttgatagtgtttgtcttcttgacactattctcattgttatttattcatctttatatccacattttttctttatctctccttgccagagagcctcttctagctctccttttattaacagctttattaaagtataatttacatattatatatttaacaattttaagtatatggtttgatggattttagtaaatttagacttgtgcaatcattactataatccaattgtagaacacttctgtcatttcaaaaagttcctttgtgcccatttccagtcaatcatgactcccacctctagccccaaacaactagttatagggtctttgatgagataattttgcctttcccatgagttttatataaatgaaattatacaacatttagactttttgcaatgtataggcttttgtatctagcttcatcttaacaaaatgtttttgaggttcagtcatattgttgcatgtctcagtagattcttttaattgctgagtagtattttatggatacactatattttgtttatccattgatcagttgacatttagattgttttcagcattggtctactatgaataatgcatccatgaacatacagttacaagtctctgtgtggacatgcatctttatatctctttatatcctgagaataaaaaggctggtttgtataccaaatatatttttaatgttttaggaaactgccaaattattttccaacatggctgtattattttacatttacattagcaacttataagagatccagttactctatggtctcagcaacatttggcattgactctatttcattatagccattcagtgagtgtgtagtagtatcttgttgtgattttagtttgcatttttcctgctgactaatgttgaacaacttttcatgtgtattgtcattcatgtgatttttggcaaagtatctttgaaatattttgcccgtgttttagttgttagtcctcttactgagttaaagaattccttattaatttgggataaaacttgcaaatagtcctctcattctgtggatttgtttttcattttttttattggtatactttaaaaagcaaaagcttttacttttcatgaagtcaatttaccaagcttttcctttatgggtcatgtttttgtgtcctatctaagaaattttggattgactcaatgtgaaaaaaaaaaattctccatttttatcttacagttttatacttaaacatttacatttagatccatgaaataatttgaattagttttgtacatggtatgagttaagcatctaagttctttatttcatttttattttttgacacataggtatccaaatgttccattaacatttgttgaaattgccatcctttccccattgaattacccaagcatctatgcaaaaatgcagttgaccccatagctaacatcatattcaataatgaaagactgagatctaagatcagacataatacagaaatgcccacatattagccagagcaggtaatcaagaaaaagtaagtaaaagtctcccaaattagaaagttgattttctttacttgtagatgatatgattctatatgtggaaaatccaaacaaattcacaagaaagctactagagctagtaaacaaattcagcaatgttctatgttacaagatcaacacacaaaattagttgtgtttctataagccagcaatgaataatttgaaaaagaaattaataaagcaatttcacttataatgcatcaaaaatttaaccaaggagatgaagacttgtacattatctgttttctgtgtttccaggaaacctatagtataattgcgcaatgttatttctatgcactgttccttttatgcttagccatgtgctctccagtgtctcatgagtttcatgcaggatctgtgtgtgatcacttttctattaggatgctaagatagaagtaattttcccattagtatatattatctgtggtaataaatatattacttattgccaaataagccatttataattcttgggatgtaagaatcaaggatgccttccagcacactggagggtagaggaaataaaggtgatatttattgaacaattactttatacacatatacacacacacacacccctacatacatatgtgcatgcacacacacacacacacacacaaacacacacacaccttatcttcaaaataaccctgacggggagacattatcattctcttaatataaatgagaaaaggttcagagagtccaatcaatatttgactataatcatacaactaccaaagttccaaagctggagattcaagctggtggttcccaaagagatggatctagtcacaatattatactctcatcccataaaagagagtctggcatatgcaaagaccattcttggcaattttgatgagtgaatatgtgaacattttttaggaattctacttcaagcacataaaggttcaagttctctcatgctcaagatttaataatattattctcaaaagtgttggtaagtcatctaaaccttctggcttatgaaaatttcaacttaaataccaaagaggtactatttatttatgctgtggagtcagacaagattgtggttgacatggtcatagcaagtaatcagcttaaatgtttggaaagagcctctgtgtgtgaagaacttttgttgccaaggatattttcatgtaatgcaaatcattttctacaccctttgacatgggagtgaaacatctatctctctttcattttcattcatccccaaagcattttgctgccttagaaaatcatctgaaggtcagttttgattgctctaactctgaaatctgttgtgttcctgatagcatgcagagttttagatgaaatcactaatattcactaaaaaatgttaaattaccatgaattgcaaggttctttgagagtgctgtaaatgaggcagttgatgatatttgtggctccaccaagaacaacaggatttaaaaccctaaattaaaatccactgaaagggtcaaatgcattttcagtgttcaaccgatcaaagtgaccatatcaaatatggaaaattcatgaattcaaaaatgtaaggtgttattcggaaataattcttttctcatgtgtcattatgagattgttgctactcttttcctatgtctaaataggcatatagactgttggaatgttaatagaacaatgcaaattccaaagaagaaaaagacaaaaggagggcaatgagcatgtatctagtttgaatattttaaaacatatgatgtaaatattatctgccttaggatcagactttgtctttaggaagcctattcatagtacatggaattttatatattttacattcagtgctgtgcagaataaaacaacattttccccctctgttctcacaccaccatcaacatagttgaacaagcaattctgcagcattaatatcctacaatccagttcaactcttgcgctatatacctggaagtagtggcagattccacgggtgaggggtcagtccccaaggctgcccccaacttctaacaccaatcacaagctccaggttattttgcctgtgcttgtaacccactggctataaattggggctcctatgactccctccttgggttcaattactttggcagctcagctcaaaataaggaagcacttatttttactgatttatgatacaggatattgcaaagatacagatgaagcaatgcataggacaagatacgtggaaaggggagctgagcttccatgtcctccctaggtgtcacaccctccaggaacttccacgtgttaaactacatggagctctccctgtacccccaccaccccccaccaccccaaacaccctttttgttgttgttgttttagacagagtctcgctctgtcgccaggctggaatgcagtggcgatcttggctcactgcaacttccgactcccgggttcaaacgattcttccgcctgagcctgccgagtagctgggattacaggtgtgtgccaccatgcccagctaatttttgtatttttagtagagacggggtttcaccatgttggccaggatggtcttgatctcctgacctcgtgatccgcccgcctcgaccctttatagcaacttcattggataggcatgactgaagcatggatgtggcagactaccacaattactacttgagaccatcactacaacagttactactgttactatttgagactgtcattacaagactgaatgaaggaggatgaacgcagaaatgaaaacttaaaacaaaaataactattttacaggaagggtaacatggggaagaagaagaggggtccctgcttcttgtgagcaagggcagctgcctgagctgcttcagcccttcatatttattgggtagaaagagcagggaggaggagggcatgattggtcagctgcttgattgatcacagggtcatattattactaacaggcttcagatttgcctaataacaagaaacacttgtgcctgggtcatgactgccctcagcattccttccgggtgcagacgcagtttgtcagcttgccaacatcctgctttcatgagaacagtttgctgtttactcatatagcctccagtggtatacttagttgatcacgaccctcattcttttggccttcaacacatggacaactatgtagaaatgtgatttaaaaaaaaaaaggagtatgatttcatactaatcgactgagtggggaaaccctgcaaggctgcctattcagagtcttcttggcctctctctgcagtattcattcctccagggcatggggcaggactccttctaaaatgagggtctcatgacccacagtcagacaaggtaggtcagagaatttccttatggccggctctaagacagaaaggtggaggaacattagagtatatttttagtttccctggcctgccttggggagaaaaaggaacaggtagaagcagaacagaacagagacagaccctattttctgaggcctacttctgaagcctaaatctccccaatattgtaacaaaagactgtccttcacctgtatcactcttaaattgttctgaagctgcttcaggacccttggataaaagaccaatacttcaacaaaagataggcttattgtgttagtcaccaaggaaatagcaaaggctatggaagttatgagccaggaaccatggacaaaaacgtgtgtgtgtgtgtatggtgtataaatatcaaagtgctcttgaaatcctgtcttaaaatgtaataatttgattatattatatcttttagacagagttcatatattatatctattaaaaagagttcatcactcatgggtcctggtgaattagcaatagctctggggtggaagtctttgcttagtttgcagaataacttcactttactgttccctacttttccactttgctctgtcctccaagattctatgtggtttgcatcagcagcctccattgccctctggccatcagttagttgatttcagctgctaagagggacccaccaaacatctggagggcaggtggaaaaggaagtcaggatatttaattccccgctccctgtgtccatgtagaagcagcctcaagctaactgcatccctccatgagtggtcatagctcctgtcaggtgatgctcttcatacagtcatttctgtccctgagttctgtccccatttaagctagagatagtgtgcagagaagagttaacatagcaagcctgactgcttatttttagaaagacctgcttacaaagttggcctttggctgacatctggatccccactatccccagaactgataagagaggaccactgcacttaaacatttgtacaaagtacggtttatgcttaacacctgctttccttgtgggggtcttaaatttgggtaaatgccagatagaggctgctcataggaacagcccccaataaaaaccctgtgcactgagtttctaaggagcttccctgattggcaacacatcacacatattttcataatgcattgctgggggaattaggcccattctatctctactggaagagaattcttggaagcttgtgcttggtttcccctggacttcattgatatgccttttccctttgttgatgaattctgtaacatttcactgtaataaattttagccatgagtaggactatatgatgagtcctgagtcttcctagtgaatcattagacccagggttcagggttggcttgagaaaccctgacataaatagcaaaagagctctgcagttctgtacctgagagtactggaccatctcttttgcccacccttttgaaagtggttcctttattgagctctccccaagttactttttttgagtgtgctttcttttactgaggcttctagtgactgtagatatttcatataaaaatattaattatttgatggattcttttctgtaccttacatttacatatttcttaacaaaaagatgaatggtttaaaagtaaggtaacacagcaacctgtacccttgacatcttatttaaggagaatgtttgattaggttgtgcttctttaaatggatgggggattgtgcatcttgtttaaactagaaaatagtacgtaaactggtggttgattgtccctaaaaatatttagctgttgtttttctcctttatctttgcgtattctggtgaaaaaaaagaaaattcactctcaaaagcagggagactaagaaaaatttacagtgacagaacacaatgttttcatggtatatatttatattatagaaaacatcacttaagtagtgagatgaatgttcttatttcttatgtgcctgataagcaattgtattacatcttaaaaacacctctaacaggtgatggtacattcatatagtatattcaaatcgtttcttgataatatttagattatttaacatccatagctatttatatcaccaaatattattctttcttttacactgtgctctctgaagcaagataaagcattgtgcttaatggaatggaaagcttcctctcaaaaacccaaagattatgctacttaaatttcaagtttcaatggaacttatgtcaacttttaaattaactatgtaaaaaataaatgttgtgcatccttggatggtttctcaaaaaaaaaaaaaaaaaaggcaaagaaagaaatgcttaatgtaaactatggtggttttttacccccaactatatttatgccagctgctttgacctaaaaagtttttttatgcttatagataaaaagctttgttttagagaactcatgaaccctttgtttattaatgtcttggtaaaccacatgtcttcttgataaagcaatcctgaatcagaaagacctctttgctggatatcttacttcagtttgcttttctgtttattgattgctttgctaataaatgctctcttcattgtaatttagctccattccagcaacctccgcccagaggacaagttcaaagttcttctgctatcaatctctcctggagtccacctgattctccaaatgcccactggcttacttacagtttactcagggatggttttgaaatctacacaacagaggatcaatacccatacagtgagtttaagggtttggtaatagaaataaatattctgagaattgacacattagttaagttctttgacattgaggataaatgctgttgtggtttcctctgtctggcacagagtgtttcaaacagagataaaattacaaatttcactagtaatcaaagaaatacaataaaaatgagatgcttattatctgataaatactaatgcttatcacattctcaaagatgaaaaaaaaatgaccccatcaagaattgatgggaatgtggggaagctggaacttttataaactgctgaggtgtctgtgtgagttcattagtacaacttttcatgtacaataatttgttaaaatctatgaaaaaatctttccttttaacataacatttgacttagcaaacttattttaggaagtttatctcaagtgaacagtcattaagtagacacacaagatgtccatacctattctatttgtaacatcaaaatattgaaaatgattcagatgttcaacaatgtttcaggaaattatagtatatggcataacagaatcctggtacattgttaaataaattataggctatgatagcatataaactgataccttagttcacatatcaataaatggaaaatgttcatgacatattgtttaaggcaggggtccccaatccccaggctgtggacaggtactggtctgtgacctgttaggaacaggaccacacagcaggaggtgagcagcaggccggcgacattactgcctgagccctgcctcctgtcagttctgtggcggcatgagattctcataggaacaggaatcctattgcgaactgtgcatgcgagggatctaggttgcacgctccttatgataatctaataataaatataatgcgcttgaatcatgccaaaaccatccctcctcaccttcccatcctgggtccatggaaaaactgttttccatgaaaccagtccctggggccaaaaaagttggggaccactggtttaaagtaaataaagttattaaaataatctgagaattataccattttaatttacaaatactggaagacataataaatagatctagttttctctaattgtaaatattatagaaaatgtatcaaatatttctattataatgaattcaagttttttaattctcaggttaaagaactattaaatctggcagtggagtactaacactcaagcaaatagtgtaatttaatacacacattgctgtttccgcagagatagaacacagcaacataaacttttgaaagagaaaggatataaacaagccatcaagcctatctttgcctttgtaacttttatgaagattttaaaggagcttatagaaatcaaattattagaattcattgactttaaaaaacatttactcagatgttttagatacagtttccctaaagacagaatgaaaaaaataggaatttttacattattccagctctatcttctctgatttttgcttctagccatgtttagctacacactagtttaagaaacctcggaacagcaattccaattcaagtttctattttgttctcttcatttaatacacagttttccaaattctactttaaccatgcttaattagttggagaactgtttaaagctctgtcgaaacactgaaattccataaccttccttaaaatggttaggaggatgccttgttttaacattttaattgactttaaaactcctgcatcgcatagagttttattttgtatgcattatactgggtttcattttgcacctaattcatataactggaatttagtttcttatgtccacccctttctcttggctctacatgtctcttcagtattccaagtcttctttaaagttaatggaaactctgaacttcatgatgcagattgcaaagggaaatgaacatctgtctacatctgccatgttggcaaagtatcctgaaaacctgctactagaatgtttattttcttccaaatatcagcatgatccaggtgtcctgaaacttaaacttttgtgacagagaaagagaggagttataaaaatattgaaaatgattttgaagatgacagtaccactgattatttctgaagttgtgaattagggtcaccctactttccatacagcttaatgcaatagcaaaattaaacttaaaactatcaatgatattattcaagccagaggcatgatttccatagtaacatattgtgatctattttatagaacatcacatgttagtacaacattggctgtttttgacgattgcactaataaggaatccaaataacattttcttacataataaatgtgtattcattcactaatcagacatttatataatcctattaaacaaggtatcatttcctaaaaccatatttttcattaaaaaatgccacttctggcatttcttgacaatcactgtaattaatgatgtgaaaattatctgcatgatggcatttgaacagtaagaacaattggttaacactgtcagaactttgtatcattctaacaatagcctcatgtttattactctatttctagtgcgtggctagcatgtgtaacatgtaaaggaaacactacttatattcagctggatgaacacaaatctttgggttaaataaaggcattaggaattataggtggagaatcattgaacttttcaaagaaaattaatagtgttgtcttccaagcaagtttgatagtttgtttgagacctttatagaattcttttttagaatggaaactttttctagctggcctaatgtactatgggattctctaagacatattttccttcttaggatcatgatatactggtgtaccatctttaaagctttcaaattatttgttattataatagcatgcaaataatgaataattttaaagattgtgaataattaactttaaaaaacaaggtatatctttacgttttatttaaggtagaggtcaagctagcgcttcgagaatcatacataatcagccctaacagtatctctattgtagcccccttctgggttgctcataggtatcttacgtgtcataggaaggaagtgaacagttattggaggaaatagcactcttctgttagtgttgcaggtttagggagtggacagtaactcatactgttttttggtgttgttcctatttgagtttggaatcaaaggagcactagacatagtaggcagatcaaatttaaaaataaaaacgatcttcattactgatgaaagtcagattagagactatatcctttttcctgcaggaagacaaattagaagagagaaaaatcaatgggctgatctgcacataatttgctccctacaccctgactccccagattcacagtcagatgagttgttcctcatttgggatggcatgaatggggagatagcccttaaatgtcactttagagaaatccttccacaggaactagaggatgattatttttacatgtaacaatgacttctatcacctacagatattatcgtagtttaagcttagaattttagacaaccaaatattttaatgagccctgggatttcatttctacccttattcatttccatctttaaaattataatttataatctcatactacatcaagggatcaatgtaacaagtggtaagatgattcagttagctctgagaggaataaatgaagaaatataagatatagagacaggatgagaaaacagaagagaagatgacaggcaactgtttttataaggctcttaatattcttaatgcggtagtttccccttatccatggttttgttttctgcagtttgttactcatggtcaacaatgttccaaaaataggtgagtctacagtacaataagatgttttgagagagagagaaagaccatattcacataactattattggggtatattgttataattgttctattttattttcagttattgttgttaatctcttactctgcctaacataaattaaactttatcatagatatgtatgtataggaaaaagaacagtatatatacacacatatatatgtatgtatatatatgtgtatatgtgtatatatatacatatatgtatgtgtgtgtatatatatatagtttaatactatttgttgttttaggaatccactggagatcttggaatgtatctcctgtggataagaggggactactatattctttcctggaacaatagatcaaatatgtatagaaaaatcattcatgtgtttaataaaattttgttcagtgcttattccagaccagaaactgtatcagtcattagaaatacaaagatgaaaggaatagttctccttactgagtggggagacatataagtaaaccaaagtaacaatagaatatataaatgttgaagcagagtaaacttggggtgttaaggaagcacacggtggcttgggaggtgtaggaaatgtaaccatgcctgtggtggcaatgatgtgatggagaaccactgaaagtttcccagtaaagaaagaatataagctgaattagccagatactgtagttgaggaagcgtgatggtcatgaaataaattttgtattaaaagaaaataaggtatattcagcaatcatgggcagttccatgtagctttggtaagtggtacaatgggggagtgctacaaaccaggagggtatcagccaagatcacaaatcagtgctgagccaaggactgtaaatgtttctctgaaaatgcagaagtctgtagtaacagcaaattttcaaattcagtgttaaagatccgtaccccaaccaaggagagcaactaccttgagataagcactcttttaacctgagtattatttttttgttatggatcattaatggatatcctattcataccctttcaaatgcttttatatctttcacactataaattgccttatatgatattcctacacaaatgcatatttccatcccaattctatctgattctaatttcttattaagtagactgctcttgtataatacattctgatctattaggattatattccacttttcagatgctacaaacattcagcaagtactgtacttcttttaattgtcatcaggttataagtcttccaacttccagtttaagcttatgccagacaatcttttggaatattcagcactgaaatttatttttttcttttaggttttggcttttggcatgctaaattattttccatcgttgttctagccttcagtgatttttcaaattttgttaatgttttcaacaaccttattgtgggataagggtaactttaatctaatctagtaaatatttattgaaataacaatgagccacagctgcacgctctctagaaagtctgaatctcagccctaggggacttttccaaatatgatccttctttgggtgctctgccttagcactaaggatggtgactttcccctgtctcttctattcctatattctttagagttttctgtaccacttagaaagtaaaaccaggcgacctctggtacccatggtacaactgaaaacagccaccagagagagaactgtctcaccttcctcggctctatcagggtcatctctgataagacagtggccctcacctgagtcagtgcccaaggtgccccccacaacaccagcggaggcctcctccactgagcagtcggaccccagagtgctctgtaggagctgtagactgggaagaagggccgggtgtggtggctcatggctgtcatcccaacactttgggaagctgaggtgggcggattgcttgagcccaggggttcaagaccaacctaggcaaaatggtgcaaccctatctctacaaaaaatacaaaaattagccgggcgtggtggtgggcacctgtagtcccagctattctatttgggagactgaggcaggagaatcgcttgaacccgggaggcagaagttgcagtgagccgagattgtgccactgcactccagcctgggtgacaaagtcagaccctgtcttcaaaaaaaaaaaaaaaagaaaaaagactgggaatgcctaggtttacacgatgggttatcactccaaagatttgtgtcttttgtggccaatggcagatccaggaaagaaatgaaagttgccgatggggataggctgggggagagcaatacagatgtgtatgggaaaccccaacccatatatattgtaaatagatggactaggctaaacattgttgctgtttcagtcttctgcaaactcagcttttccacaataaagctctatctcctgtcggaaggaaggaaggaaggaaggaaggaaggaaggaaggaaggaagggagggagggagggagggagggagggagggagggatggatggggggaggggaaggggaaggggaagcacataaatatgctgggaccttcatattgctatagggcacccctgcttaatggaaccctcctcgcatctccaatgcaaacagccccatggcggagcaggcagcagccactctggtatttgtgtgtttcgcagtcctacagtgtgtttcctgtccttagagaacaaggatttccagccatgtgcctaatcacctccactccctatcttattttttaaaaacctctttgtagctgcttctctttgccctcacaatccttcatgcatagaagtcctgcttatctaaaacttctgttgtgtaaattcctcattgctgataacaaatgtctccaaaatttagcagcttaaaacaataaacatttataatttctgtaggtcagaaaataagaaaattttccattcaagatgttggccaggtgacagatttaccccttggtggtagtttactgacccttagtctggtgtgtttagtgtttaacaagcaaacaagttacatagaggaaacatagttacttttctgttttggagaaccgcaaggactttctcttagaccttctaacaaaaggacactatgaaaagcaaaagaagaactaaaacaaacatctaaacattctttattatgaatgatactttcttatactcaataataaaagcaatcaaccggtatttacattatttcaattttaaaaatatgaaatgtatccttaatcaaaagagtagattggtatagtttatgtaattaaataatatgataggaaagcagttagcaatgattcttcaccaacttgtgaaatgtaactttgttttttttttttcttttcatttcaggtattcaatacttcttagacacagacctgttaccatataccaaatattcctattacattgagaccaccaatgtgcatggttcaacaaggagtgtagctgtcacttacaagacaaaaccaggggtcccagagggaaacttgactttaagttatatcattcctattggctcagactctgtgacacttacctggacaacactctcaaatcaatctggtcccatagagaaatatattttgtcctgtgcccctttggctggtggtcagccatgtgtttcctacgaaggtcatgaaacctcagctaccatctggaatctggttccatttgccaagtacgatttttctgtacaggcgtgtactagcgggggctgtttacacagcttgcccattacagtgaccacagcccaggcccctccccaaagactaagtccacctaagatgcagaaaatcagttctacagaacttcatgtagaatggtctccaccagcggaactaaatggtaagaatccaaggctgagattcccctttttggtcaagacatgaatgagaatctattgtaattgtgcaattaggaatttggcagttgtattcctttttataactgcacaatataataattgagaaacagtttctaaagatataagatagtatttgtcctggttagtggaacaagtgtatttcttctaatctaataacaaattccattcaattaaattgccccttaaaaggctaatattatctttgctcttaatgacatctgccataacacaaatgatgtttataatttgaaactcacttatgaaatgcattatatttgactgtgtcacaagttagggcacccacaagcagtacatttttctcttctaagcaagaaaaagatataaaatgatacaaaaaatatgtatataagctaactgactccattaagttaatttttgcattcatgcatttgaacccttggttatataggccagacacacattcacagatttttaatcatttatatcatgtacatattatagcaaaatctttctttagatttgtaaagttatttggtaaaactgggtagagattgactataacatttatgcaaacagggcttatgttaaacaagttaaattaaaacctccaaatttgaaaggatacagactggagctataatgatcaaattccccaaaagaactggccattcttaacagaaattgtgaatatcaattctgaaaaagattgaatttacctatgataaagtgtagttattttttgtctatgtgttatccattttggtttgttttcctcatgagtatgcctttaatagtattttatacattcatctatatagcagtttgttgtcttctatgtacctgtcatctagattactaaactactaaatcactacattttgaatgctaaagaaattgacagtaatctaattagaaagacaatgaatatccagcactctttaactgacctgtccctaccctacccctaaagtaacccctttgtctgatgagttacgtaggttcactatttaatttctctaggaataattataagatatgaactatacatgagaagactgagatctactaaagaaaccacatctgaggaaagtcgagtttttcagagcagtggttggctcagtcctcattcatttgtagaatcggccaatgaaaatgcattaaaacctcctcaaacaatgacaaccatcactggcttggagccatacaccaagtatgagttcagagtcttagctgtgaatatggctggaagtgtgtcttctgcctgggtctcagaaagaacgggagaatcaggtaaagatcaatgttttaaattctacttttaaaacctctgaatgcaaatgtttcctcaaattaaagtcaaagtactgtgaaagtacattttgaaaagcaagaattagaaacttccatagaccaaggaaaattttcatatatatggatttgttacataaacaactcaaggtcataaagtacttgcagcaagttctagggggcaaaagtaaatgctttagttattaattcatggggcgaaaatggcttaactatagttatagtcttctgggaatgtttgtcaaaaatagcatttggtttccactcctgaagtggattggacacatgtctcatcttgctccatatacagcctaatttatgttcaatgaaagagataactgtcaccaattccacaaatttgtctttgtttttatttatctttccaaaataaatagtttagatactagattgtacataatgacagaatcgtggacatcaaaatctataattcacaagtgtgcttgtaagcagttggcatgatgataaggaaggaggacaacatatctaaattttctggattatcttcattaaggcaaaaatttttaatcctccactttattttttatattaaaacacttcaaatttcatgagcctttaagaaaaaaaatacacttttgttatgtgtttaatctgtagatatcaaagaaacccaaaccctgatctaaacttgacctgttaggaatatggaggatgagggtagctttaggttgatgtccaagggaatcatttcatgaataaaatacgcattgtgcttgagcatctcttaatgactaccagccatcttggacaaataatagagccatgatagcacaagtgatgaggcatggcattctggaaggggaaaatcaaggtcagaaatgaaaagtaatgggtgaaactgcaatactggtccctcgtaatcttatgggtcactagctaatgaaagtgcaatgagttcctttgataatacacctttggttagcacatttaaaatccctgtaaagagctcaggagtggcaggggggaaagggaaatgcatgtgtatgtaacctgaacatttcaagaaaaatttaacaaaaactttgagacattcattggggttatttagaatgctttaggtttacctctttctgaagaataatattcagccagctgcattggattggctcaatgacatatttccctacatgggaaatccagtacatcaccatgcatttttctgaactttttgaactgagatgttctatttttgtgacgttttttagatactcgtaagacttataatttcctatctatccactttcctatctttatgaacatgagcaaattcctatgagatttttattttgcaagtagaaagtagctggtaatatgaagatggagaatatactttcagataacattttaaaaagtgaataccttttacatataccagcatattcttggactttttcaaagcagaatattttaaaaggtaaaggtatttcagaaactaaatgaatgtgtgaattaaatttaaaaatatatagggacgacattcattgttttgatgttattgttattgttctcattgatagcacctgtattcatgatccctccttcagtctttcccctctcttcgtactctctcaatatctcctgggagaagccagcagataatgttacaagaggaaaagttgtggggtatgacatcaatatgctttctgaacaatcacctcaacagtctattcccatggcgttttcacaggtattgttatttttaactaatgtcctttcagaattggcttagggcttcatttggacattttttgagtttgcagaattctgtgacagaattctccctctatattgattaaacagggcattttttcttaatataatattatgtgtacaagcctccctctttgtatgtcacttgtatttttccagtataatcatatattgaaactaagttggtataatttatttcataagacttgttttttttccatttatcatgtatccttaaatattttacatgaagttgactttcattaactgtgtactatcatgttatttggacacacaataattatttaaccagtccacactcagttgatattgtattgtattaattcttttggaaatataaataacattgataaaacttcttatatgtacatttcatatacatttctacttcaaaaatctgaagaattgaatttatcacagcttataacaaaatgaattatgaatatgttcaaagttttgaatatacagtcatatattgccttctagtaattcatcccccagctagcagtagtgagaataattatcatagctaaaagttactgaggctttactgtgtacgtgaactaattcatctgatacatacagcaatcctagaggataggaggctcttgttctctccagtttacagttgtggctgatatacctctctgcccattttaccagcatccaggtggccaatagcagaagctgatggaaggatgtcaaccgaacaagttcttctgtgtatttggctgttcagtgcctcctctgagagagatgctcttctctgggcattagcataagataaaaagatctttacactttatacctactcccatagatctagccacatttttctttccatgaattcctagttcctgatccttccatctttttttttcatgcccttggccaatatttccaagccactgccatattgtccaggtacattttaccttgagacacgtctctttccacacaacatgggtgaccaggtgaactgcctgaagttctgcccactaagaggatttcttcgctctgctgtttcacagggtcatctctgacaagggttttagagcaacagctaccatttagacttgcagccacataccaagacatcctatctgtaaactaaattctgctttttttccacattctttcagctcttaagggacctcccatgggtcataggtatgagctgaggttgagccaccagtataagaatggtggatgtcatgggggcctgaaccacctgcttgcacaatgtattacggcttttggctctgcttatacccaatctcagacatccacttccattttatgatgaatttctgttgggcccttctaacctcaagacttggctgagacaattccaagattataaaaaagtagctctagctgcatggctatttggtgttccatgaccagatgttctgtttttactgaagcctgaaagcatgctagggccatttagcaaatggtatatagtttccattacatgttatgcctttgttccaagctcttggggtctatctgccctgtgattctctttctatgtgtgccttgcaacattttttcccacaatgcttacctctagtgctgtaaaaattactacatgttatgtcccaagtggctcatctgcctgtaccacaggctggacctggtgcagagccctttccgcctctgggatacactcaaaactggcagcattccatattactcagtaaatttctcagaacagtattctcaaatgtggaatatgctcccttcagaatgtgaagaggtcaactagacattttgtttccttcttagtggtggtagaagcaaggtgcaataatttgtcctttattttggaggggatatcctagcatgtctcaggccacttgaactcctaaaaacttcactgatatggtagattccttaatcttcataatattgctgtctcactttctagaacacatatgtcttacctctgcatacctaccatttcttgtttgtctgattcatttaatatgatgctatcgatataaagaatactgtcaaggtggcatttatagtttgtcttaaattggtgattaatcaccctcagatttcctttgtctttcttcagtgcattgatggcgaccagcaagatccatgcattgtccttataattactagtttccccagagtagtccttgtaattactaattccaccaaaccagtgaattaccttctactggtaactcatcgcagttcaccactaatggaagtttaagcattgcaccactagggcatgctgtggactgttagtactctacctgctgtctatgatgagatcattgtaaaccagcaagtggatgatggagctccaaaatatcattttagagtctccttcctagggccagtcctgttacgactatcttagggcaaattcccccggaagcagactcttggtagaggactgagtacaggaggtttattgggggaactctttcagaaacaacaaatgtgaagtgataaagtatgtaggattgagcagcaaagaagctgaactgtgatgcaatagtggaagcagcctcagcggattccgtgggtagttctggagctgaaatgaccctcttagcttatctcaaattaagctaggaagtcagacctttgtaccctagagtatttgtgtcctcgggctggtgtaacaaattaacataaactgagtgtcttaaaacaacggaaatttaggtgttagtacagccaggtcccccacaggctctaggagacaattcttctcttctacctacctgtggctcctggtgttccttggcttgtggcaacataactctaatatctgctgcctctgtcttcacaagtcctactctgtgtctctgtctcctctgggtctgtgtgtccgtctcatttctcccataaaaataccagtcattggattttaagctaacctgaaatccaggatgacaactaattaattacatctgcaaagaccttatttccaaacaaggtcttattctgaatttttgggagacactatacaatccactactaataggtttgccatttttttctaagcctttttaggagaccagaacccatgtacaacacacaattttattttctatactgatgaaaaagaagagccaataaataatttatgattacttatttttcattaatctgtctacgtgttcactcatttgcaattatctcatgatgaatacacaactggcataatatatatattttgacttaaacaggttagtctaccgatctggtataccatgggatttaaggtaaagttagttgtaactttcatgtggtctttgccatgttgtatctcatttatactcaatgttttattttgttgtttttactattctctggctttataaactattctttctttgtaaaacacagttttgatttatctattacttatattatagtagttgttgttctaagaaaaaaataaggtgagaaatattatttataaaatacagccttagaagtcaacctgtttgttcatattccacatctcccaattattagctgtatcacacgtctctctgcttctggttttattcatctgtgaaatgggaaaaccatttttgctcacctacctgcttaaagagcctgataaatattgacacattattattagtgattattattaatggtgtggaactacattatactttataaactagctatcatttaatggggcaggaaaataaatatttttattattgttgttgttatttaaaaggctgttccttatggctgaactggaataaggacatagatatatcaccttattctcttttttatttttatttctttgagacagagtctcgctctgtcacccaggcttgagtgcagtggcgcaatctcagttcactgcaatcttctcttcctgggttcaagcaattcttgtgcttcagccttccaagtagctgggactacaggtgtgtgccactacacctgactaattttttttttaatttttatttttagtagagacagggttttgccatctttgccaggttggtcttgaacccctagcctcaagtgatccacccgcctcggtctcccaaaatactgggattacaggcatgagccactgcactgggcctaccttattctcttttgaactctctctcctgtgcaaatattctctgttcaaggaaatgaaatcaaaagtagcagaacaaagtccaattttttaccttctcaatgattaaatttgtatctgaactgacctgagtatgtcttgttataatctttgtaaataaatagccaaaattcccagggaaaatctactataaaaataactagtaagaaacctttgcctaagaatgagacaggggggatacgtaaaagtggtgatgatgtaggattcattgtgggggatcaagctgctgtagaatttttcctacccctttgaagacttatttcatgaaaaactttcaattagatagattttataagacttataaattgactctatgtacatgataaagacaaagtctatccaagtgataattttatgctgcaagttctggggccaataatgtatttttaaaataatgtaatttataataatcatctgtaaagaaggaaaagccttttcaaaataaatattagtgtagatttcttctttcttattttatttcatcgtgggttcttgctacaaagaatattttgcttaaaaaatagttgtacttcctaaattaaataagaaatagcttcatgtactttatcctaaaaacaataccattttctaaaaatttacattgaaatctaccaggattattctaaaagggatgaatattacagcaatattcataagtttaactcagttcaaggtttattttacttagaaaattttaaatcacatttcacagaaaagtttgtatcttcattatatcaataatgattttaaaattagaaaaataaagaattacttggtatttgatgtttttcttatttcaaaatgtaattgcaaggaaatggttttaaagttttaaatttaaattattcctagagttttagaatctttaaaaacacctttatttctgaatgttattgaaacactgtattctacattccaatctcactgctttttagaacaactcatgtaacttacgaaattttaaagtcaacacctaggcaaatattccaaatgaattttattttacccctaaagagaaagtctctagaaaactactccaaatgttactgaactttacatttatctgtatttatatttatggaagattattttatatgactatgtatcagtagccctaagaaaattagttttgtactcatagttactgtcatactctctgttttaatgacttttattttctgaatataatttctagtggcctttgtacctacaacctaaacaaatttacatggttgcttttgatcacttcaaattataatgacagaaccaactctcaatgttaattgtttaataatttatttatggactgtgagtttcctgtcagtcttctttgctcaaatctgctattttcatttgaaattatatgataaagataatatttcaaataacgtaactgtttgatctaatctttatatgtttgtttatataagaaagatgattgagaattgacttaacgtggatgctcagtaatatgcttaatgtttaattttttcccctttttcttctgtgactttttttcataaagaaaatgatagtatcgatttaacatagcaacggcatttctttctgtcctagcaccatcaaatagcttgggtattactgctctgggttacttttggccaagccccatggctttgtttggactttatcatgataacaatgacaatgtcaccgtctttatctctaccattggtgacaataaccataccaccatgctgctttatgaggcaataacttggttttctcatttatccactcaggaactggattattacctcataaaacagtgtgattgtacaataatcaattaaatcctggcttgtcgagactcttcagaaaaaaaaaaaaaaacccttttcctaatggtggttggcaataattccctctgtctgaattcatggaactttgactgccaaggttatattttcacactgattacctattatctttctttctttctttctttcttttttgccttgaagctgttgcacactgctaaatcccaagaactatcttacactgtagaaggactgaaaccttataggatatatgagtttactattactctctgcaattcagttggttgtgtgaccagtgcttcgggagcaggacaaactttagcagcaggtaagcaagttttaatggatatgaaaaatctgttgcctatcaagaaaaaaaacttataatattcaacaccttctctacttgagactttatatttgtcttctcctccctcactaactctgattgcttcttacctcaacagttttaaacaacaacaaccaaaacgtaacttaaagaggtacctaggagctacgagttacagctgtgtcataataagaaatataattagtggtagagtgactccactctacaactagaaatatatagaatatacaactagaaacatatacaaatatatagaactagaaatacatagaaatgtaattagttgtagcgtgactccagggcttaactaccaacctgtgtcctagcagtgtcctgacaattgtgagaaacaatcaggaagcttcttatgaggacgttaggatacctcttccctcagtccagacattttttgtaggcttggctctactcactcctgatccatgggaacatctagaaattactgtgtggcctggtgttatatttggctttcatgaaataggtaaatgtttatctattgttttattaagaagaagcttttaagttaataaaatttaaataaaagaattgttattaagtataatctgagtagaaatggtttgtataatttgtgcttgcttcattcaggactaactggattcatacaaacctgattacatgtattagtaagacttataaaacccaattatttagcattaatatattttcaaatcagtgtttttctgattctagataaaagcttagtttcctggttatctttaaagaaatgtccatgtgtaaggaggttaagacactctagatgaattacagatattacgaaaattcatgtttacctgtaaaaacatttcctagacctcctccccaaatcccttcatcctattattaataggtccaattatgtagggttttttttctggttctggaaaaaattgcttagctcaaatgatctcatccaagtaatttatttttttcaaaattttcattaatgcaaacaactctgaaattctaagaaattatggtttactaaatttataactgaacactttgtatttttatgtattttatagatgtgcatttcagatgcatgaatacattgatggagtacctagcttgtacaaaacactcttctcctataaaactatctgtttttgtatactgtattattaaaggtttactgaatgctgaatatggacagcagaggaggactctatctcctttaaatgatacaatttcagactagaagacaaaaattaaaataagaatcagtcttacaagttggagaaagtaaaaatggagacaacggagggtgaagactgggtgtgttatagtaggggacatagggatcccaagcacgtggccatgcaaaactggaatcacatcctctcagggttgcaaaacatgtaaaaataatctagtgttactatatagccagtatcaatatattctttgtaatattcccccaagtgttcatctaacccatgtctgataccttcagtgttacagaaactactacgtctcagacaaagctataccatctttagatacctcttttagaatgtgatttcttagattggtcaaaaatatctcctagtaacttctactcaacattcttattctacttccttgggggctgtcgttaacctaatttatcatccttccaataacattttcaataacattatatccacccaagtcttttctcctttaggctgcatatcatggtggttcccatctgaacctcatatgcaatagtgtctagagctgttattagtataattcttgtagatgagatctagtctgccttttcatagatataagcaaactaaagaacctgaagagagacatgcccgtccctagaaactagctggatcatggagatgggaatagaagagcaggaaacatgtctacagaatagaatctgcctgccctatgcattagtggtaacatctgtgctaatagtatcctcattggttgcagtggcaaaatcctgttgcgtaaaagatgatgtacctgggtgctctgtgcagctctcattttagttactggtgaggcgattaaaacgactcctgtccactggcaggattgtgaagtaaaactaactagtcagagccctctgaatcctctctctattttttttatccttgaaaaatagaactggaaacttatattcgctaaaagtcatgtgacgtgaaagttagttgacttacaaaaataagagtttattcatatatgtgaggggaaaaaaatggttagccaaaatgccagggtttcaatccgggctctgccattgactagctgtgtgaccttatataaattatctaacctctgtgccttagttttccaatttataaataagcataacttatttgtagggttctgatgaggattagaattagttaatacatgtaaaatatttaaagcagtgcccatcacagttcattctcaataaaaatttattgtcatgatttttatcataatattatagaagacttttgttagtcacagtataaatgttatggaatttctaatgttatcaaaatcaaggagagtttattttacaactttgattttctaacattattataaaatataaaatggagagttctaaaactaaggattgtattgtgaaaataaaacttagaaaggcttaaaatctgaaagcattatttattatttctgtaagaagtatgtcattcagaattattatgcacatttcaaaactttgctcaaaaacagcaaatttcacatttgttggttgcaatatagagttaataatgtgccataaatgtattattactacattttattgtgaatgctcaattcagaaccatctcttgagggcttactatttaaagcactgtggaggattctaagataattatactcagcatttgggttaaggagttgagatccaacaggtaggattaacaccatggcgacatgtgctaagggctgtgagaaaggtgaaaaaaatgctatgggaaggtagaaaatgagataaatgattttgatttgggagactgagtagatacctcattaaatgctatttcagataaactataaaagaatggtaaagactttcgcagatatttactgagcacatacaatgtgctagtttctgttttaggggctggcactgttccaagtactgatgtaatgaaagcagagatttatgaagacttccctggtggtagagtacacaatagattagaagagggagtgtaataagtgtctggtagacttttttaaaaaggcaataagagagtaaatcagacgagtagaagtgaagattgaaagaagggaatggagtgacttcaaggaagacagacctggaagttaagcagtgggaaggatggacaatgatagcaaatattgcagcccatggtggtgccattaaataaaaggggaaagatgaacaaagaacagatgggagaaataaactcgtgagtttatttgatcatttgatagaaacacatccatgccaattataaccatccaggagcagaaattgcaaatctggggcttaaaaatgatgcagattttgtattcatctgcatatagatgggagctaatgctataggttataatcaattagtgaaagcagagaaaatgcaaaatggaagcccaaagaaaacaccttagtgaatattctatctgggaagaaagaagaaaggaagagtgaagtgaacagaggtatggtcagaattaggaaaagaactgagaggaagcagtatcagaaaagtcaagggaagagagaattctagaaggagaatattgtctgcagtgtcatatggtatagggaaagcaagagaaatgtgacctaaaatggatgcgaggtcactggtgactctctggggattaccctaattagcatggttgaagcagaagctggaacatgaaggattgagcagcggcaggaggagatatagtggtaaatttcaaatgtgtttttttttttttattctttgctaaaatttttcttctacccaattttcattcttcaaaaaattgtattaccttttgtttccatataaaatcctttcttttctaaagaaaaatttattttagtgtttgtttttttctggaaaaaatgtttattttctaattccttaatatattttgttagaactatctgattcttcacctgcccagcagaaaaagaaagtctcttatatgacaaaagtatggaaaaataatttttacttacagttgggtttattataaaatacatcatttttagggttgttcagatcagtgaaaataaacttatttgcttttatttgaataccaggaaaaaattataaatccatcattctttttgcctccttccttattcagtagatgaatgtgtatttctaaatgtttttccaaaacaaaacatctgaatagaaagtatagacattaaatcatagaaatacactgcagacctataataaagccagttctttagaatggtcaacaattttgctataggagagtaataaaagttgacttgcaactttactgttcatcctgctctgttttttctactattaacattgcaatttggagagtatatattattccaatgaactccaatggatttgtgggaaatttaactcttatgtctaatagctcatatgagctcattatcagacatcaatggaaacgagtgaccattcaaaaattttgaaaaagagcaccacaaattagaagtagtaattagccttttggaagcatttgaatcatgaaaagatatgttgcccccttaaatctcggtctcaaaaatcagaaagatacttgtgaagatttatcttgctgtttcattaaaaagcttgagaattataattggctctctcttgttttaaacattttttcaattaaatatatgattagaatgggtacatttcatccagagtattgcactgctgcttctttagtttcaatgcctgtgacaaagtctgagaactgatttgagagaggtgttctctcaggagcagctgcatctctctccattgcaaaatcttcaagcagtgttattaatggctttggagttgcttctgggtgtatgaaggtaatgagttgatgaactgggccctcttaaaatccttgttacacttttctttaagattctccttttaatccgagaaatttgtgcatttccacccattgcaaattgagtttagtttaaacccttcttatgagaaattacttttggagatccattcctgaagggacaatgtgatatttcccttgcctgtcataaattgacctccatactacaagcttagaagtgcccatctcgcataaaacaagtaattggtgtgcattaaattttctttctgaatgcaaagtaaaatgtataggctgtttgctgctgggttgaaaacacacattgttttgcattcgggtacataagtcttttccttgtgaataggagccagagtgattaaacaagcactcttaatatgttaatttataattttaattacaacaatcttgtatatatagtcattagtgaatactaatataaatatttttctacctttttattcataatgcataaaccaatcacccagttacttctctgaggttgcctgtttttgtttcataatacaatctttgttcttagttatgaatgcattttgttcattcctgtcttcaataatccctcattaagctagtcactttctgctccatgctaaaaaggaaaaattatcatgcaaatgtggcatgccatattaaaaagcacattaccaaacacttttgttgctgtccttcaattagtttcccttctttgaatttaattccatttgttgttaaactactgacttgatgtatggactcatgaatctgaggctgctgccaagaaagtggggaaaaaaaatcaaagcctcttcgaagagctgcagaggcgagctgaaatgaatttgcttcacctttgacaagaacacttgaacagcattggaatcctctgatgattcaacttggctaattatccaattatttatttcaagaataaaggcaccattttacaattaaggaagtgtaaagtagtctgagaaatttggtaatgacagatgacttaagtaacttctaagataaacagtatctgtgcaaaacttgtcccaccaattgttttcaggcagcagttggtgtgtcttagcatcagtgaaatcctgagtacactgaaggttttttgtttgtttgttttgctctttcaacagaaattattttacacttgtaaccaacatgtcaaatttccatggctcttaagcaatgtttaagttatatttctcttgattaaaagctttcggttcaaagcaatactttttaattgcctaatgatataagtcagttcttaggaaagaaccgcacatttaggagttcatttgcaatataactgaaaaattcattgcatggcagtaaaacaatttactgttaattacaaggagaagaatttgctgtagcatgctcgcagattgccatgaatcatgcagcactcctagagatttataacagatgtgtaaatgggatgaattagcagggtttaataacagagacacaaatcatgcagacttcaaggagctttaattgatatactagaatgtgacgggcatgaatcactcagccattcaacagcactgtaacatatggtcagctcaatatgccgcatcttaaatcggttggtgagtcgtaggttgtcccatatggtggaagcaatacatttttcatgattaaaaaaaagaatccattttttaaagaaatatgattgcaaagcatgttattgaacagtcttctgaatgccaaactgctttttttaaatgcttttttttttctttaacatggcagcttctcaaaataaataggggctactccttgtaataccagatcgctggaggcattataagaaccaaatcggtgcttgttggcacactcgatccacagcaagcctatagaaaagcgcagctgatgattgctgtgattgtcagggaaatccttcaggctggggcaaaacaaacaaatgaaaggatgatgtcactttcagagaagttcaggaatgcccagctttgtaaattgaagaaaatgagttggatgagagatccctgcttagcagggtaagaaagtggctgtgataaataataccatgacccctaaggtaacaattggatgtaacattttatactaacttcttaattaaatgctcagtcctacaggggcatgtgaaaagaagcactggctggtcatcacatagatggtagcaccaattccaagtcattcttgaagaattatttcagtatctgcaaacaggtaccctggttgaagactggtaactggtagtgtgcaaacatgtttttattggaactgggatctggcagcttttggaaaagcttttgctgcattagtaaatctgacagacttgaaaaaggaatattgcagccttagaactgtggctgccagaatttaatgtcaacaattaaaatttattttgatccttacctagtgtttattactgtttgtatacacaacagaccttactaatacagagatgcactattagatggaattaccatctgttcagagtgaaatgctggcatctgtcttagatgctaaaactaaaatgatattatttctaacaaaacaaaattaactgctttttactcaccaactttaatttgtagtgtgtagttgtatccaaggaaaaggcttgattttgaactatgtgatgacctctgtggccaggtctatatttagatatgcgactttatcaggggctctactggcctttttggcatatgaaaatggcatgtagaaatcacactttcaatacacaattatagcttcataatatactatgtatcctataagtcattaaaacaacacaaccaagctatgtaaaaattgactgaatcagagagactctactatgcaaaatattttgacagatacgccctaaaaaactgcaaggaaagaaattaaataggcaaaaaatcatctgaacaaagttgctataggtcccacagtgacatctttaggaaaatacaaactgtatctttcttctctgttagactattttaaattttctcccacatggacatatataaaaaatttacattcagtgccccctccttttaatttaaagcctaagtatcctattaaaataggtctttagcttttggaagttagagaatttggaggatcaaggacaatggtagtttccatactgatgttagatcagtgacgctactttctgagaagccagacttctattctatatatcacaaaataataaattgtgtcacaccagcatttaatgcatgtacacagtgcattaactgtaactgtagtacatttatttgtgctgcaggagacttgaaaatgatgaagaaatcgatactttgctgtcagagaagcaagtgttacgatgcatttaagtagttaattgcataagccccataaaagcttcaagtttgggtagcaaggatgccataattacagtctgagcaactaccttttattagtggtggactttagggaatggtggttgctgtcatcattgctgctatatgtgcagtttagaaataatggatcctcttctctcttcatgtgtaggatggtagttttgtgcaaattattgtgatcgccagaacaataactggttaaggtagtgtttgttcaccatgttcactgaacttctctaaaagcagggttttctttatgtcacagaacacatagacaaatcatatttgtatgccatgctaaggtaaaggaacaaggtggctgagagctgaaggggataaaccagaggggctcctgctggcttcccaggagcaaaggggatcaggatgtctggtacccattcgtggcttatgaacttagaagtactgttttaaattattcaaccaaagaattttgaaactggaagaggtcctagacataatcaagcctgtcactctaacaattgaagtaaccgaagaatagagagacctaataatggattaaccaatgttccataatcagggtcttaaagagccaatctagagcctacattttctcctttccagatcttctagtaatatcctctcctgaaggtgacttgtcaacaaagaagaaagtggcaaaatatattttattctttcttccctggtcagataatagacagtcaacaagatgatgctgagtcacccctgagagtttcgggggaaaacttttcctctttaagacactgattggtgagcagctgattctgcagcagtctctctgcaacagagaaatcagggctcatgacctggacttcttgtttgcgtcctggtccagtgcccttttgcaagtgttctggcctagcagtgtttggcaaattgtatttcctggcatagttttgcatttctgcgaaaaagtcaaaatcatattctattgacagggtgcttattaagaatgtcttatgtagtctgctccccacccacccctgaaacatagaaaaattgtttattcttaaattcttgtcatcatcatagaaagctgatgatgctttaagatattgacacagccatacagtcttcataggcaaaaaatgaacagattccttaaaaacaaatgaacagattccattttaaagaccagtacctcagaagagctttgttcagcttttagttcttatcctatggtgctcaaaatgctacactacataaattttgcaagtctaaatgtattcatttggatatactactaattatgttataaagtaataaatgctgcataaagaatgcatattataacattttataaaaatatctatacatcgaatagatagacaagaaattagattacccctattaaaaaatacaagtgctattttaaaagtacaagaattttgtacttttattcaaatagacattttattcttagaaatgatggataatgaacattcattttaaactttgtatattatccttagaaataatgaatattgaagattcgttttaaactttacatttacaagaattttctgggtaaatacagatagattttgaatatagatgaattgtattccttaatcatacataatttgaaagatttgttcttgtaatgatagcaccttatatttgtatagaaacttgttttctaaaacataaagcaaatatgtatattgttgtagaagcaattgttgtcaatgtatgtcactgaaaatgtatcctcatgttgcagatgggaaagtgggagcagatataaagggatttttctaagatcacacagatttagacattaaaaagtgaaatataatttttaaaagtctaccaaatccctttcattattcagtgttgtctcttaacgaactgttttgtaaattaacaaatctttaaaagtcatatctacttttacctatagttccttttccttgaaaatctgacgaataattcatcattaccccaatctcttggtgattctatgtgcatgtatgtgtgtgtgtttaatggttcagaagtatctatttttcttcttattctacttgtgtgtatgtgagaccagtctagtttaattgattgacaatttcacttaattcccccttccagccttagaagaactctgaaaagaataactcagtaggatgttcaccctttcaaacaggcttagttgactcctccatgtgaaactgtaaaacacacctactggaatgttttttgttttgtttttcttttaagcaagagaataaaaaatgtactctagttctattcattctcaggaattgacttctaaaggacagtcccattgctagatggaataattcctctgggaatcaagaagtgctctactacttaaagtttaaatggtaaacattaactttaatggactctcaagaatttccctattgattagaatcactttgccaaattaaaaaaaaagtgtgctctaattttcaataattattacacaaaaacgacagagttgccagaattccttttgtttagttttgtttcctattactcttaatctatattcctgtttaagacgtaatttttggattatgctactgatgggggaaggaatttgatttctgtggtggtgctgagcttcaacattatctccattgagttgagtggttggagtaaagtagagatgtatcaactttcaaacaaatgggacctggagaaaggctgctttcaaacagcaatgaaattcttcagcttttaagaagcataggaggcatattcatacttcttctcaacatttagttaaaatggaaatcctatcctcaacacaccaaatatgtataatttgtgatgctctgtctacatctttggtgtccagtatggtagtcatgaatcatatgtggctatttaaattcaaaatacagttaattaaaattaagaaatttgacattcagtttctcattctcactagctacatttcaagtgctcaatagtcttattataaggctagtggttaccgtattaaacattacagtcctagaacatttccttcattggagaaagttctattggacagtactggtaaagtagtttttggctattggatattactaggttagtagtttatgaaactaaaaagttcaggtttctgtgtcccaaaaccctagggaatctagcaaatttcaatttaaacattatgtaattggttctccattgcttccctgagcccaggactaaaaaatctttggcagctttcctttcctagttgagattatagccaagaatggcctgctaaaatcttaatacaaatatgtaactctaaactctgaagagagactctgggtgaagaaatttctgaatggcttagccttttattttgttttggattattttgaagtgagatcataacttgtagaatgaaatctttgagaacctaccatttaactgatttttagcagaaaaaaatgctaagagaaattatgcatataattcacagattcatacatatataaaaataaaatatcacatgggctgcagtggcagaaaataaccagaattgttaattatccttctaacttgatgaactttttgctcagtgccttttcttttttactaaaagttaaaatagaaccaaaatgaattgtttctttttgaaaagctggccgaaggtctaaaaagtaacaaatactaattgttctaagctgctttacggtgaatttcctttcatggtttaagggcttcaattcttatatccacatcattttgatttatatttattgaaacaggcaatgactttgcgtctgtgtatggctgtgttaacacaggtgtaaattgaaagtccacagatgtagtttgggcccttaataaataggctcggtgattatgacatttgttcctttctccacattcacctctcaaatccagcagacatacttaaagggggaataaatctcagctcacaaactcaactgtttaagggaaaaaaaaatcaaaccaaaacaaaccttcattttcaataaatcagctgttaatctgaatgagcaagttgtagggaaaaccttaatctccgtgactcctagggtttcccaggaaccttcaaagaattgccagtgtcccaccacctgaaaggatggcaaggtcccagtgtatgcaagggcatgaggtcactactgctccaaggctaagcccactgctggtggtggggtcacttcagggccagggtgctctctaggaccaagaggctgaccaaagttagttgcctggaccgttgtgtgtaaactgctgaactcacaggcttgttattttgtgctgatgctctgtttaacattcagagtgctattgcttgtttgctttcatttagatcagtttttaagctttaaaaatagaaaatagcgtataaaaggagcttttttgaccaaagaagatatacagatggcaaatacacatatgaaaaatgttctatatcatatgtcataaagggaaatgcaaattaaaataagataccactacacacccattagaatggccaaaatctggaacactgacaacaccaaatgctgatgaggctgtacagtagaaggaatgctcattcattgccagtgggaatgcaaaatggtacagccactttggaagacagtttggcagtgtcttgaaaaccaaacatgctcttaccatatgatacagcaattgcacttcttggtatttactcaacggagttaaaaacacaaaaccctgatatataattagatgtacacatatatatgcacatcatagcagctttattcacaattgccaaaacttggaaacaaccaggatatttcatcagtagatgaatgaataaataaactgtgataaactatgctacatccagacaagggaatattatttagcattaaatgagctagcaaatgatgaaaagacatgaaggaaacttaaatgcatattactcagtgaaaggtcagtctacaaaggctacatgctttatgattccaactatatgactttctggaaaaggcaaaactacggagatgagtagttacctggggttggggggaaggagagatgaataggcagggcacagaggatgttttgggtagggaaaattttctgtgtaatagcataatgatggatgcatgccatcatacatttgtccaaacccagagaaggtaaacaccacgtgtgagccccaatggaaactatgtactttgaatgaaaatgatgtgtcaatgcagatttatctactgtagcaaatgaaccatttgggtgccggatgttgatattggaagagactgtgcatgggtggggagatatggtagaactctgtaccttcttctcaatttttctatgaacataaaacttctcttaaaaattaagtctactgggcgtagtggcacctgtctgtagtcccagctacttgggaggctgagacaggaagattgcttgagcccaggagttccaggctgtagtgagctatcattatgcctgtgcatagccactgcactccagcctgggcaacaatgtgagactccatctctaaaaaaaaaaataaataaaggttacccctggcacattgcctatggtgtagccgtgctccacaggagcaatcaaaaacaaaaataatgaaagtctttttaaaaatgactttctgatgtatttttacacaagcacaaagttttggcaaactcgtgttaatattccttcattacccattggttggcacggattatgctttgcctgtgtaaattacagcacggagttgatgcctctttaaggcaaggggctctgccctatgggtttagtgctagtcattggctgtaggtttcactgcgggatcctgtggctcctgggtgaggcagctcttactcagccaagggaagttctacgcagaagggggcagccatgagccatcagaaaccaacgggcacagaaactgggccattggggtacctgcttggtagagggactgtggttggggcaccacccagagtacagcagctactataatatataagatctattatttagctaaaaagaatagagaagttattttcaagaaaaaatttaatttgaaagttttgtgtgtagtatattggccatttaaattttgtttcactgcatttaagataaactctatattgtgttttcagttcctagagccatacagatacttgaaaccacaactgatttgatttgaagtgtgatatatacaaatacatatatacgtatatgtgaatatgtgtgtctagagacagaaaccaaattcttgaatataacaggtgttttctaatatttagcaccagcacaactgaggccacctctggttaaaggaatcaacagcacaacaatccatcttaggtggtttccacctgaagaactgaatggaccctctcctatatatcagctggaaaggagagagtcatctctaccagctctgatgaccacgatgatgaaaggaatccgtttcataggaaatgggtattgtaaatttcccagctccactcacccagtcaatacagacttcactggtaagtgtgtttgacattgctttatttaggagacacgaagctccaaaatgttttctatattttcatatccctttacaatgaatttttattatacctacttagagaaatactaattcagccctttgatagcttttgcctgattgtttcagcatgtccatctttttagaattctggggaaaaaagtcaggtaagtgaaggaaaggaaaaataaaagatgaagatgaagaagcagccttattggatcaaagtatgtgctttgtatttgtctttttgtgaagtatgtgccaggacatgtttcttgaaatattattcactgtgttctctgagcaaatgagtttgcaaaatgccctcatgctattggagattctcagtatgcaccccgttactgaaactccaaaaagcattgtaagaaagctattcaactttgcttagctaatcatgcctaacagatatttgatgtaatgttttctttttctttctcttgctgtttccttcttctttttttcactgtgacaacttaatatctcatgttctatgaagaacattgtggggaaaactaatcccagggaaaagataacttctctaagccaggactatggtaaagcaagtgaggctcttgtttcggtcacaaaatttaaaggcactaaaaaactcagtgttaatgtaaattttaatgcaatatttttaaaaatgaaaatcaatgtgaaagcactataaaaatattatcaaaagcttaaataaagacagattgaactctgtaccagcacaatcctgcctcactggccttaccctcctcctggccttactagtaccgcaatattttggaagtcccatgacctctgtgacttacagcttctaatagcatgatttcaatatagctgtaaaaaaactctacttatggtacaccatttttccaatttttaaaaaaatttacaaagtataagatatatattattatgtaaactcataaagatgttcatttaatcatccatgagaaagtcattttggagcaaatagctagtctttaaaatattgcatatgtgaagacaatgaaatggaattcgagctataaaaatttgtattgttttatttttacttaaaatagtaaatagtttgcttttcattgagactggctgctgatgcaccttggtaatgaatcatgattatattctaactgagatatattgagattaatgcatgattaactactctctcagtacatcaaaatcattgcagagtattagaaattgaaccattgagctaaaaatgctcaacttctgctttatattcttaaaatggcaaaaaagaaaagaaaaaaaaggtaaggaaaaggaatacatgaataatagtaaaactcttttctcaaatgaaaatggaaactacctccctgatccaatatttggcttgagatgtgtttcttccaagaaatagcatccgtttccattcagctgggcatagctgctgcaaggatgtcagcttggatttgcaggctagccagcagacagatttttgatgggatcacctactgttgttgcagtgaaagatagaatggcccgtccaccgttaataaatttggtcatcctcgctatctcccttgctggccttatactctgaggtgcaagggctaggggcagatgcagtgtctgggaagttttccaaattcctctttaaaaaagttaggctgtaaacactggcctcactaagcaggatccttctgtctataacaaagcctccagctgcacagaaaatatgcttggagtacacaccatttgaaggacaaggcagggagatcacaattttggcttgaactactccctggagctttggtgattcctggagaatgagaagttcttctgtgttcaggcatgttctgggacattgctgatgccctttttagtggtagcttggctttacttttaagacccctttaacttttaatataaccatgtatatactaagttattggtttgatcctttggctgacttgccaggtttggctgaatgattttattgagttgtaccgaagcctaactaaatgtacccaattaatgagctaggacaggttttcaaaaccaactcaataactttctgtaaacttgcatctttcctaaatagagaggtaagcatataattagcatcttacattattcttactgatatattatcctatttaatccctctgcaaccctataaagtagctctttttaccctcgtagtacaggaggaaaagaggctccagtgagtgacttgcccattgtgccacagctattgaatttcagggtggaaacgtgaattggagccttccaaatttaaaggcaaggtctctgctacagggtggaaaggaacttttgtagactgttctttggaagtgatagaataggaagtatacaaaagtaagaaagagggataggaggtgaaataattatcacccaaatattccttatctgacactgctaaactttttggatttgtctttcagttagtttcagctcacaaacagcaagtagtgttggcattatttattcatttatttgtatccccaaagacatgtaggcatcaggtttttttttaatagcaattaaacccagagtgttactagaagctagatgtttaaaatataaataacattatgtgaaatgggctgaagtgttatgcgttaaaacagtgctttcaactcacattcctttatatttcattcagtttttatattctgaggcaaatttaatgagcaaatccttgaaacctctaatatgatgaattacattttaaaagttaataactttaagataaactaagatgtcctttgttttgaattattcaattcaaaatctcaaacttcaactaaaatgacttctgaatagaaatatcaattagtactcaaatacaaatataaggttgatgtacataattatacatattttatatatgaaaagataagttagattgtacccatcaatgacaggaattataaacgcattcataacacatttcatggccatgaacattatgttgcaagtctcagtaagaaatatctcattattgtagtacaagaaagggatctcttacacaacttatgcctctttcatatttgctttaaatatttttatcttacacaatagaaagagaataattcaagcatatgaatatatgtcctaaaatgttgtttaatattgtaaattaccaagcttaatactgtaaataaaccctgtcaatatctacctttgggcagaataaagaaccagataaagctattttgggacctatttttgcttccttttcttttctgatacaagtgttcttttaaaaaatctaatcttcaggaagaatgtattatcagtcatttacatcatagtttaaatttaaaataattaactctctgtatattattatgaggacttcgaagaagattaactgataaattactttcaaatccaggccccattatttattagctaaatgtaattagacaactcatttaatcattttttgtgcttctgtttccttttctttaaaattaacataattccactgacagtattggtatctagcaggtaggtgaggatttaaagtagatagcccacctaatgaactttgcacagtgcctaccacacagattatttagtactcattaaacattagctattagttattattcatttaataaatatttattaagtgcctactatgagacaggagctttcctaagtgagagtattctgcagttataaaatcagcattctattaatttatttgctgttacacatgcaaaatatgtttgctcaaatgttatatctagggcatgagtaatatgcaatattccatattaaaatgtgatacttaattttgctattgaaaatagtaaaattaattgacttagtggtgaggacttgggcaaactacttttctgagtgtctaatcttgctcatctattaaattgaggattttgttgcatgatcaatgttctaacctctaaaattccaattctgtgaacatagaatgtttaggaggccccacaatccaaaatacaggctgtaatcatggcatctgtgagttaaaaaaacacctagagtttaaaataaattgttttctataatattttgtttattaatacaatttaagattgatacaaatttactgcttttctctaataatttaagaaatttagtgatatgggcagagttcaacataaaatagatattcaattattgggtcatatcagatgttataaaaaaagcagaaaattaaaatagtttcgtgatcttgtaattgggcaatgatataaacaatcatggtgaaacagtgccccagttacatggggttaaaaatactttcttcttccaacacagaaatagcaaatagagcctcccctcccatatgcaactagaaggggatatcattgtgcctttggagagaaaaaaaaatcatgctcgtttttttcaggaatgcagagtaaatctacttgatttatacaaagaatttagttctttccttgtaatgctagtaatccaagtggaacctggtaaaaacagcaagtaaaatactgctcagattggcattccaaaggtgaccctctttctccttgtcacttattttttcctattagcgaaaacaggtccatgatcatttgggggaaggtttgactattgtagtatccagatgccaatcacaccagccttttaaactgcctttactggtgaccctgcccagaaatcaggaactgcctttggggagatctttgtagcaaaccactggggagatgagcacacacatgcacctggatataattcccttttatttgtcttcacgagaaatgtgattactgatgttgaatatcttgcagatgagaactctatacagtttcttcataataatgatgttcaaggacactaaatgattgtcatacatttttgtatcatagtattcaccttcccaaaaatggttgaactaaaatgctttagaatacgaaatgcaattaattaccaagggatgaaaaaagaaatgcaaccaccaaaaatcaatatgtttaagagcatattctttatttcttttactccataatatttatgccttattgttattagtcttcttatttttagtgaattgggacatttaagcacttcattaaaagaaagctgattataagcatttatagtgaaggtgcaagtagggcaaacttcttcagatagactaattagtaaaagcatattaattctgaccttcaacacccttggtgtcccactatttgttttccttggagtgggagcaagtattttgacagaaagcgcttgaaaaaaataaaaaacaaaacaactaaacaaaaccccagttcttttcaagacagatttaaatcacaaattttacctaacctttgatgttagatttcagccctagttattgaaaaacaaatataataatctactatgtgtcctagaagtttaatgaacaggcagtaattatactaaaaaagtaaaggaaagagtaagaacatggtatgtggcagcaaagtaaaggagaaataattctcaggcagtgacaaaactctgctgtgttttctgattatgaaacaatcagaagagatgagaatggttgagttaatcagtttggactgaggacaaggatcaaaatgcatatcttcttagaataacagaagtcacactgactcatgataactagagatatggagatgtaaatgtcaagactgtttattttttattatatttagtagagaggtataagtaagttctcaggaaatgccttcaggtggcattgatggcactgcgagatgggagaggaccattatttccccattcatcaactacatcataagaccaatttaagaatgcatgtgttttaacccttgccttttaaaagtgacttattttgaagtacattcctgtaagtctcccttttttttgaaatattaatgttaggtaactggtaagctgagccaacactgaaaacaaactgtttttgttagctgttagcagtattttagttaacttaaagcatctgtttttgtccatcactgttaaaatttttcaaaatgcattgtcacctgatatataaaccacacgtgtgttcctatatactcatcccacatgcataaacatatgttttccagaaggtctctgggttttccgcaaccactcaatgggttctccttgcccactgcctagacagagccagtttatcaagacaggggaattgcaatagagaaagagtttaattcacatagagcctgctgtatgggaaacttgagttttattattactgaaatcagtctcttggagagtttggggatcagagtttttaagagtaatttggctggtaaggggttgggaagtgggagtgctgattggttgggtcggacatgaaatcctagggagtcaaagctgtcctcttgtggtgagtcagttcctgggtgaggaccacaagatcagatgagccagtttatcaatctgggtggtgatagctatttcatgagttaagggactgcaaaatatctcaaacactgatcttaaattttccaacagtgatgttatccccaggagcaatttggggaggttcggaatcttgcagctggaggctgcacggcttctaaaccatcattccttatcttgtagcaaatttgttagtcatacaaaggcagacaggtccccaggcaagaagggggtctatttagggaaaaggctgttaccatctttgtttcaaaactaaattgtaaactaaattttttcccaaggttaggtcaacctttgcccagcagtgaacaaggacatattagagtttataagtaagatagagttatttaggccaggtctctttcactgtcataattttcttagttataatttttgcaaagtcattttcatttctatatagtctcaaatatacctgctcaaattgtccagtgtcttttctgccagtatgttggcattttggaatcttttcaaagacttcattgcttaaaaaaaatgctgttgcttaatgatattttgtatcaatataacacattaattttaatttccccttcattcagcttaaatgggttggaaaaggaactttgagcagaaaaagaatcataattggtcagcaatggtagtgaaactagcacctttgaagatgattgatttttgatttagtaagatgaattattttgtgtatgttttcttgaaaaaaattagttaaaacatttaaaaatgtatagttatagttattttataccagttacagcactcttgaagtgtatagattaagttcctttctattcagatagagaggaatctgggaacatcattgtcaaaatgccatctctttcaaaacttggttccagtgctctaaagaaatgttttagaagattatgcactaatgttactggcggcaaattcatatagatctgtagccacctcaatttttgcattctcagaagaaagaatttgattgaggggacataaggcatattaagagaccaagacaaattttagagcaagagtgaaaatttatttaaaaattttagagcaggaatgaaaggaaataaagtatacttggaagagggccaagtgggtgacttgagagatgatttgacctttacttggggttttatataatggcatgcttccgaggtcttgcgtcccttctcccctgattcttcccttggggtgggctgtccacgtgtacagtagtctgccagcaattgggagaagttgaatgtccagtgtgtttactgaagttataggcatgctcacttaaggcatgtttccttgccagttaagtgttcccagaaggtcatataccggttaagcgccaacattttgcctcttagtgcgcatgcttgagcccactcacccatctcctgagatctcattgggaagctgctgatcacccgtctcaggtgtttctatctatagggagactgcctttccctggcactggctgtgactgattcttattattttagagagatagtgtaacaattatcacctgacggttgcctgacatttctggtggggcgttgtggggggcggtgcttctctgaccctgcccatagtctaactgccaactgtaacactaacagtttcattgaagtgggggaaatgttaagtaataatatgaaaaccatatttaaggtatatatatataaggaggctcacaaacatagccataggccgtttgtttggagctttgaaaagggaggctcagttccttgactgatgagcagtttccatttggaaattctttgactttagtgcaacttcaaaataaaggcatgagacagaaggagagaggaagaaaccctcaagccatctaaagtcatctctggcaatggtggccatatcattttcacaaaaaaggggcatccttggggaatatcataaaggaagaataaggacttaagggaaatgtgtgggaatgattgactgatcctccctccagcagaaaattaaaaatcaatgtagatgcatttttctcagcttcttcccttcatttttttcctctcctgaaacctgttcctccttccgtgtgtaccatctacagtgaatatcactattgccttaggcggaaaccttggaactctccttgaattggcacttgaactattcactcatttcctcccattctattaatgattcctcctctggccgttcttcctcggatacatctcttggaactacctgctggtcctacgctactgcctagtccagacctatgttgtgggcttctctgccaacagtttcaatcttctccaggctgttcttcaaacgaattatttttattggcattctcttgtgtaaaaccttttaatggtttcccagcgagagatgcccttcacaaacccttttctgcttacctgctttctacctatatacctcctcatctctcccaccaaggactggtatactctctagctctagaccattttttagtcccagtgcttgaatatagcacactctctcagatgcccatctctttgaacatattgatacctttgccgggtatgccctcatctatttgcaagtacttcgctttcctttcacctggctaattgctactcatcatgaaagggttagcttagctgttcccctaaataaacttccagcaaccccagcctcctcccatgccaaatctgggttgaggacctctcttatgtactactatagaaaccaacaattactctattttagctcttaccgcattctattaagacaggttgttcagggagctaagctatgaggacgcaaaggcataacgatgatacaatggactttggggactcaggggaaagtgtgggatggggtgagggataaaaaaaactacacattgggtacagtgtacactgttcaggtgatgtgtgtaccaaaatctcagaaatcaacactaaagaacgtattcatataaccaaatactgcctgttcccaaaaacacctgttgaaaaaaaaaaaaaactggttgtttgcttatctatgtttcatgtagactgaaattatgactatctttttcatgcttaacacatttgtgtcttgcacggcataagacatttaccagatactcaataaatatttattaactaaatgagtgatagaaaagagggaaatccaaaagatggatcacttagctgtaagaattatttaatggcaaaattcattatgcttttgaatatagttcacatttttaaatccacgtttttgaaagtattgatggtttagagtgataactcaatttgtttagtctctattggccttagatgtgtaagaaaatacattttaaactgtatagtaccagagacaaaaagaaatttcttgttaatggtcctcagttgctggcaaagttacttgtacaccagttgttatagctagagtgttatatcagaaattgttttctgccccaccatagctatcacattgtgttgctgaaaactaggtggttgcacatctcttagatacatgatctccttaggcttattaaattttgaggttaatgaatattttgacacttttacctatacatatcattagggcttattgcaataggtttaagatgacagtcataataaacatatacagtacaataaaaagcacttttaatcttgaaagtgctttaaaaacaacagtgatcaatgctatggatggattaacagcatcatgctgattgaattctatttcaaggacaatggaggtattgatgttggcagtctagttcagaaagtggcaatggctgtagtaaatggtgcaggttctggagtcagactccccaggtttcaaatctggctccccaacatgctggtgtgcgactttgcacaagtcattcccccagtgtgaaactcagtttcttcatctgttaaatggcttattgtaaggtttcaatgcaatcactgtaaaggattagtacacagtgtcttagtattgtgtatgcatttgtgaccagcattctgtaattctggacttcaattatgtgcctttccattgcatacatatattttatgtccctaagtcacataaatcttgttgatacttctttatgacctctctctactacacggtactctgatcattcactttattttactcattctgtgaacctctgacctgttttttgttgtcattgttacctttcttcttccactagaagcatacatgttctgcatctcatttctccacatctatttaaacagccaactttaaatgttatgtgtacttataaacctaactctattattccccctgtcttcataatcagtcttctcgaaaactaagactctctatgtgtcattttctcatggatcaattactcctcaatctactgtcatttggattcttttcttccacttctttattgtaaatactttcttctagattatcaatagttttcaagtcagagaactttccttaatcctcaccctatgtgccaataaataatattggtgccattttttccttttaaaaaataagaagaaactaaatatttctcactaggtttctccttctattttccctaaactgtgtttcaagctttgatattgctttctacatccacctttaaatggaagagttcaatcactcattcggttcgtatgcagtttttccttatttcactccactagctgatgttatgattgctgtcgtaaaaaggatactgagcaacacaagaatgattcctaaccttagggagcttaaagtcttgcagtgaaatcatgcatcaaacatgtaattaagtaattacaagtgacttctgtctccagctatgaagcatatcaaaaaatcctcctgctgagaaaagaaatagaagctggaaaaaatttctcaaaaatatggttaaagacataagtgagtaacaaaggcttctaggacttgtgggatcaagatcctagatataagaaaaaccatgtaggtgagccttttaaattatctttgtttttccttctgttttgtttgttaattcctctattgcatagtcttagggaaaaaaaaaagacaggcaaaaaattagagtctaggtggggtcctggtatacatgccaggttttcaattgaaatcctagaagagcaaatcattaataggctcttcttcctcagataaagcctcaattattcttaactactaattatactgagataaaagttatttttttaccaaaaatatttagatatttgctgaaagatcacatcaaccagagtcccagagtgtgcaattttttcctatacaatgtcgggcattcaatcaaatattaacaggcataccagaaaatagggccaaataaccaaaagataagataaataaaataaaaaatagaaacatatcctcaagtaattcagatatatggaaatatgtatttgcatacacacataggcatatacacacatatacatgtagatatatatgcatatatccagacacagactttaaaataactataattaatattatcaataaaatcaatgaaaatgttcagaatttaagtagcaaatgggaatatattagaataggaattttagagcggagtaacagctgaagttagcaactcagtagataaaataccaattccatccctgataaagtaaatagccttgttcttaatatcgtatgcaacaatgtaagttgggaacaaaatatatatgaaacacctatttgtagccaatatatagcaacagtgcagagctattatgcttaagtgaagaaaagcaaatgaactgagttgcacacacctggaattattgagctcaagcagagacattagtatatctggtaaaggaataaaaactggaattcagggctacaaaagtagatttggagggtaggttcccagagagaagattgatgctgaaaaataattcaaaaattctgtgtaacaattcttttttgggtgcttggccaacatttagaataatcctatgagaaacatagtagagaagatctgcttggtagttggagctaagtagagatttcacaggcaacatagagctaaggatgcacacatggagtttggacttaaccacagtagagaaaccttggtgaatactctgagctttcactcgactctccaaaagtccgtcctttatgagtaaattcccatgctttaggaataagggctattctttaggaacattgagataattgaaacagattcaccctagtgaagcctaaagccaaggctgagtaaggtcgaggtaatctggtaattttacttcccgtcaaaacagaattttgtattcattagtaaaaggtaaaataatccagaggttttactatgcgtcatccatgaagtgaccaataatgaaatgttaatagtcgatagaggcagacaaagacttcaaaataacttcagttaatgttaagagaaaataaaggacaaggtggacagaaaggatgataagataaaaaatatttcaatgcaaaattgaaatctgtacagtaattaataggaaaaaatggtatgtaaagtaaaatacctgaaatgaagagaatattgataagttttgccaatgaaacattgcagaaggcaagattagagaactcaacggtcaattgtaattgtccaaactgaagcatatcgagaaggaaatgaaaacatgaaaaaaagaacaatgaggtatttgaggacccagaaggaaagagtgaaagaatgagacaatagtaatattgtagaatagccaaatattatcaaatatgaaaaataagttcacacatagtttaacaaagtttagcaaaccataaggagggcaaatataaggaaagccatatccaggtatattacagtcaaattgcttaaaataaaagacaaagaaaaaccttcaaaagcacctggggagggtggggagacttattaccttcagtggagcaaaaataagaatgatgtctgagttttcaacaacaacaataaatgaatgccagaatataatggaatgatactttttaaatgctaaaattatttttttaacaataataacaacaaaagaaaactaccagtcaagatttctgtacccaggaaacatatccatcaaaaatgataaaataaaatatttttcttaacaaaagagttgaaaaaagttatcatcaaaagactggcattataaaaatcataaagtgtattaggacataggaaaagatcccaaaaggaagcacagagctgcaggaaagagtgcaaacctctagaaatggtaactaggtgtgtaaataaaaagtaatatttatgataaaaggcataaaaatcatactttgaagttgataacatgtaagaaaaaatgtatgacatcaattattttgtcacaaatgatgacggggtctatatggagctaaactgtggtaaaattcctaaaaagttatggaagttgaagaattaataatatgaagtaggccatagtagatcaaggattcagattatgatgccaaaggtaacaaccaaaagaatgatttagaaaattaatgtaaggaaacactaaatgttaaataaacacaggttaagctgataaaggagtttgagggtggcaagaagaagccagaaacaaagagcaaatgtggggaataaaaggacaaataccactgtggtgaacataaactcaactatatcagtagttgcattaaatctaaatagtctacccaaataagcataaaagttctcagattgatttaaaaaataaaaatatatgttgtttattcttataaacatactttaaatataaagacaaaattcgaaaacaaagaaagagataagatgtattgatatatagatagattttaagacaataaatgttagtagacaaaatggaggacatttcataatgacaaaaagatcaattcaatagagggacatataatcctaaatttaggtgctacttatagtttcagatatgtatataaaactgaagttgacagaaataaacagagaataaatatatcctcatagttgaagatataaatccccatctaatattttgacaggaaaagtacacaaaatattagtataactatcaaagatttgaaaatgaataaacaattacatctgtatataaaacatgtgacattttataagtgttgtcatatgtagaacatcacttccaacaactatataatatgcatttttgaggaacacataggacattttccaaatagttaatatcctgggctatagaaatcgcataatttttttttttaagagacgaggtcttactgtgttgctcaggctggtcttgaacccctgggctcaagcagtcttcccacttcagtctcccaaagtgttaggattacagatgtgatgagccactgcattcagcttgatctcataatatttcaagttctctgacaactgtgagattaaactagaactccaaatctaaaacataatccgattggaaaatatccctggctcaaaaagaaattatggaaattaaaaattatttttatctaatgataataatgccttaatacatataaaaacattgtaggatggacaatatcaggaatctgatattgctttatagctttaaatgcatatattagaaaaagggaatagttaacaatcaattagcttcccactcaagaagaaaccaggaaattaaagcagcatatgacacccaaaaaatatttgaataaaagaaattataaaaataagagaaatcaatgatatagcaaacagaaatgtaatggagaaaataagaccaagaattgattctagaaaatttggggaaaaatttctttgcaagtgatcaaggaaaggagaaagtacagattactactctcagggatgcaaagagccattactagaaatcttacagacattaaaaaaaataataatgtattaagaacagcactacgctaaaaccttgacaatacaggcaaaatacagagatcctttgcatgggagaaaaatctccaaatttaaactgacacaagaagatctagaaaatctatgtggtcctagatgtgttttaaaaatgaaatctatagttaagtcttttacataaagaaaaccccagggaaggtggcccgattggtggatttcatcaaacaattacagtagaaataatagcaatcctacaaaaaaactcttacagaaaatagaaaattgcaatggtttctatctcattttatgaggtcagaagaacttatacactaaaatctgacaaagaaattaacataaaggaaaacacaggtcaataataatcacaaaagtagattctaatattctctgtgtgtgtgtgtgtgtgtgtgtgtgtgtgtgtgtacataaataaaatgttatatcatgaccatgcaggttttattccagtagtgtgtaatcttttcaaaatgtatgtgattcaacacattaacatagtaaaaatgaaacattctaaattatcaccacagatttaacaaatgcatttaataaaatataataactattcataacaattctcagcaaactagtaatgaaagaacacatcctaataaattgtttttgtaaaagacctctaatagtaaaatatcaagtgctttttcccagaggtcaggtacaggacaaggaaattcactatcaccacttttatttaatgttgtactggaagtatagtactagccagagcaatatagcaataaaataaataagtattaggtatgtcaaagaagaagtaaaccatctttatttgtagatgtcattatttttattgatgtcaaaataatatataaactattcagtttactcagtaaacttagaaaagtgtcgaataaaggtcaatgtacagaaatcaaatgtttctattgaatagcaaaaaacaagtagaaaatgaaatgtttaaaagtaccatgcttactagaactaacacacataaatgacttagaaacaagtctgctaaaaggtaatgtaggacctccactctgaaaactacaaaaaattactgtgagaaattaaagaccaaataaatggaaagttacgccatgttcatggatctaaacacttaatattgttaaatagcaagtcttcctagtttgatctgtagaatccatatagtccctctcaaaatcccaggatttctgtaaaaatttacaagctaattttaatatgcacatgagagaggaaagtacttagagtagccaaggcaatactaaaaaagggcaaagtaggaaggcttatgtatcaagactaactataagactgcagtaggtaagcatgtatagtataggcaaaagaacagataagtatagtaataacatattgccacataaataccccaaataaatacatatatatgcagggcacagtggctcacacctgtaattccagcactttgagaggccaaggcaagagtattgcttgtgctcaggagttcaagactagcctgggtgacatagtgagacctcatctctacaaaaagctgaaaaattagctgggcatggtgaggcacctgtagtcccagttactcaggaggctgaggtaagagaatctcttgaacccaagagttcaaggctgcggtgagccttgattgcaccactgcactccagcctgggtgacagagcaagatcctgtctctaaaaaataataataatacatacatacatatgtgctctaaaaagcacatgcaaagttgttcatagcaactttatttctaataatcaaaaactggtaacaatccaaatttctatcaacagtagaatggataataaattataataaatttattcagtggactgcatatagaaataaaaatgagccaactattgcttcagagaacaatgtgggtgaatcttataacctgttagtgagtaaaagaagctagaatctaaagagtctagtattctatttatataaatttcttctttttcattttaacatttattttaggtataatgggtacaacatgcgggtttgttacttggctatattgcatgacgctaacgtttgggctatgggttccattacgcaagtagtgagcgtggtatccaataggtagtttttccaattacagtcccctccctcccttccagtgtctgttgttctcatgtttatgtccatgtgtgctcaatgtttagctctcacatataaatgaatatgtagtatttggttattgttccagcattaattcacttagaattatgaactccaactgcatccatgttgctgtaaaggaaatgattttgttcttttttgtgattgggtagtattccatggtgtatatgtaccacattttctttatccagtccatcattgatgggcacctagattgattctgtgtctttgctattgtgattagtgtagcaatgaacatatgagtgcatgcgtctttttggtagaatgatttatttttctttgggtataacaggattgctgtgtcaaatggtagctctgttttaagttctttgagaaatctccagactgctttccacagtggctgaactaatttacatttccaccaatcgtgcataagcattctctcttttccacagccttaccagcatctgctgttttttgactttttaataataaacattctgactagtgtgagatggtatctcattgttgttttgatttccatttctctgacaattattgatgctgcacattttttcatgtttgttggttgcttgtatgtcatcttctgtgaagtgtatgtttggctgggcgcggtggctcacacctgtaatccagcactttgggaggccgaggtgggtggatcacgaggtcaagagatcgagaccatcctggtcaacatggtgaaaccctgtctctactaaaaatacaaaaattagctgggcatggtggtgtgtgcctgtaatcccagctactcaggaggctgaggcaggagaatcacttgaacccaggaggcaggggttgcagtgagccaagatggcaccactgcactccagcctggcaacagagcaaaactccgtctcaaaaaaaaaaaaaagagatagaagtatgtgttcatgttctttcccattttttaaatggagttgtttttcttttgttgatttgtttaagttccttataggttctgcatattagaactttgtcagatgcataatttgtatattctgtaggctgtctgtttactctgtggatagtttcttttggtgtgtgtgcagagacactttagtttaattaggtctcagttgtccatttctaaagctgcaaagtgaaatcagtggtgacagaaatcagtagatggggtaataactgaaaggaagcaaaaagaagccctctgagattctggaattattttataaattagtctgagaggagtttataagtgtagatttattttgtaaatgtccatcaaaatataccttgataattagtgcactttatttttgttatactttactttgaaaagttactgaataaatgtttcaagcctgcaaagtccaaaaataagatgtgaaaaaatactgtaacataacagaagcactcaacccagtctagaggattagtgaagacctctccgaggatgaggcaagttgagttagctaggccaaaaaaaaaaaaaaaaagaaaaaaaaaagaaagaaagaaagaaaaagaaagaaggaaagtaaaggagtccaggtagagaaagtatcatgtatcaatgtcttaatgtgggagatgacatgtacataaataaacaaattagtaagcaagaaaaacttggaaattctaatataaattagattcttgccagaagggtgcatggtgaggctgaaataaaaaaggggccagatcatgcaagggccatcacattgaaaattttgaacgtaattttattcatctttataagaccactgtggaggttacagcctgataccaagaatgtttttaagaagggcatgctgatattttcactgatattgtacatgtaccattcatagattgactcactaaaagttgcaattttatttaatcatctaataagattatttatagaatgtctgcaaaatgttagaagatcttccttataagaattagcatagctgaatggtttaaaaaaaaatgaaattctgaatcccagcatggatctattgcattcttgcaattgtccaaggcaaaaggttctgcttgcctgcttcataaacaaaatcaattaaccgagactgcagcattgcagtaaaaagtttaatttaagccaagccagccaagtggaagaactggagttatcactcaaatcagtctctctgaagtcttgaaggttaggatttttatggataatttagtgggcagaggggctagggaatgggtgctgctgataagttgaagatgaaatcataagagcatggaaaatggtcctcctgtattaagtctgtctctgggtggggcaacaggatgggttgagtcatgagtcattagtccaggtgggatcagtttgaaaaacatctcaaaaaagcaatcttgggttttacaatagtgatgttatctataggagcaattggggaagtcaccaatcttgtgacctctgaccacattattcctgaacagtaagcaattataaaaattacacctacattttagcagcattcaggcccctcccgtaatcctattcttgtggcctttcattagtcttatgaaggtggtttttagtctctgagaagggaggaggttagttttagggagggatgatcatctatgatcatctttgctttcaagttaaactatgaactaaatttctcccagtgtccaggaatggccaaagacagcttgaaggttagaagcaagatggagtcaactatgtcagatttctcttactgtcgtaattttgtaaaatcagtttcatcctaatctctggagaagtacctagaaatttgcatttggataagatatacagatctacactattaaagacagagctatcttacccacccccaccccagctatttgtctaagggaaatgaaacaatttgtacatacaaaaggctggcacacacatacgcattgcgcctacattcacaagagccagaaactggaaacaactcaaatatccatcagtaggtgaattgattaataaaatgtggtatatgtatgtgatgaaatactagtaagcaatacaaaggaaagagcagaagaacacttaatcgtaattccacttatataaaattcttaataataattaatgtatagtgacaaaaaggagatcagcagttgcctaggcctgaggaggagggggtgatggaaatgctgtgtaacaatcaaggtagtggttttacaagtgtgtacatctgtcaaaacatatcgaactgaaccatttaaacagatgtgcttcagtatatatgtaaatttttatctcactaaaattaataaaatattctccaagtgattcttgcaacattcaagtatgggaaccattgatttacactgtaatgaacaagttgctttaactttgtttggaaaccaaacaattttaatattattttaccatttaaattctgagctctttcagatagaaacttaagcagtgtgtatactgcttatcactccaaatttcacctgaaacaaattggtatatactgtttgtcataaaaataagaaaatgactttcattaaattatgctgacaatgagaatcttgtacaatttcaatgaaataactttttttaatgaaatagggtttcttttgatctcattcacattcagaagggaatttttgtaaatagaaaggactatattttattttatcctaagaaggaatttagtcagtaaaaatatgaaatagacacttgagtatacagttgaccagttattgccttgaagctactgcacctctgtaatgtatttttcatagcttatataatccgtgttaatatgctacattattaagttcaactgtgagaaatatagttgcttgaaaacagatttcttctgcatacttataaattcagtagttggaaaaaaattaaagaaatataattaaagattgcaaaatcaatttgaccctcacttaaaatgtgttgagtggaggcagcaagcagcagcctacatctgatgctgttctctccttgtttacttcacaaaactgtgcaaattagaactttaatttacagagctgttaaagcctcattaaaaactttcagcaagtatcctattttgagggtttttttccccttatatctaatatgcagcattatctctgttttgtgggcatgtatgaggcaatatctataggcatattaatgtaaactgcatatatgaaatgaaagtttttcacatggaaaggacactagtggtgtctgtcaattgcttcccaaagtgattaatttctccatttacttggtgtttattggcatctactaacactggatctctgttggatcataggaatataattgggctccagtgaaatgggagaattccctgacaccctgttgcaggatatgtgacagaggtgtggcttgtctgcttgaccgccttgcactcaaactccttgcaggagagggagcatgcagatgggcaggtgtgggagccagggcaagaacttttgggctccagtcccatggtagtatctaggggtgggtgcttgtgactcccaaagccccagtgggtgtgttacaatgcccttttagctgtgccatccacatatggcttaagtgttaaccagctcagtgctttcttggtacctgggttcttgtccggtgtccaagaagaatcaggttacatggataaactgaaggatggtaaatgtgggggattttattgctggatggaggtggctctcagtggaatggatgggaaactggaaaggggatggagtgggaagatgatcttcccctggagtttgggcatccggcggccaatctcctctctgactaaccccagccgaaatcctctcaatgttcagatgctccttttcttctcttcttctatgtggcactgctctgctattctcctgttcctctgctcttctgctcatggagcctggggtttggggtttatatgggtataggatagtggggcatggtgggccaaaaggcaacacttgggtgtgaaaacagaagtgcctttttttatttagggctgtgggtttccaggcttcagggtggggcctttgccagggaactgccctcttctacccagcatttccctgcctcctgtctttatcaccagtagacttgttccctgctcttacaggatttcatgcgtgtccgtgtgaagagaccaccaaacaggctttgtgtgagcaataaagctgtttatttcacctgggtgcaggcgggctgagtctgaaaagagagtcagtgaagggagataagggtggggccgttttataggatttgggtaggtaaaggaaaattacagtcaaagggggtttgttctctggcgggtgggagtgggggtcgcaaggtgctcagtgggcaggagtgggggtcgcaaggtgctcagtgggggtgatttttgagccaggatgagccaggaaaaggactttcacaaggtaatgtcataagttaaggcaaggaccggccatttacatttcttttgtggtggaatgtcatcagttaaggtggggcaggacatattcacttcttttgtgattctttagttacttcaggccatctgggcgtatacgtgcaggtcacaggggatgcgatggcttggcttgggctcagaggcctgacattcctgccttcttaataagaaaaataaaacaaaatagtattgaagtgttggggcggcgaaaatttttggggggtggtatggagagagaatggacgatgtttctcagggctgcttcaagtgcgattaggggcggcgtgggaacctagagtgggagagattaagctgaagggaggtcttgtggtaaggtgtgatattgtggggatgttagaagaaacatttgtcgtatagaatgattggtgatggcctggatatggttttggatgaattgagaaactaaatggaagatacaaggtccgaataaaagaaggaaaaaaatgggtattaaaggactaagaattgggaggacccaggacatccaattagagagtgcccaagggggttcagcgtaattacttgcttggttggcaagtttttgggctctatccttgagtttttttatgttgtcatacaccaggccagattgatttaggtaaaaacaacactcctcatttaagaatatgcagagtcctcctttttcagcattgagtaagtcaaggcctcggcggttttggaggacaactgcagctaaagagtcaacttgggcctggaggactgataaagtttgtgatatgtgtgtgatgctagcagagaagtcattagacaggctacagaaggtcatgacagacgttgaaatgcctgctattccagtaccgagagcaatcatggaggcagaaagtcctaaaccgaccatcaagggaattagtggaataactcttttttgtcatgtcggtgtcatgaggggaacagggagctcttcggtcccatttgcaaattgaattttgggggtaaggaagactagtgtacatgtggctgtccaattggcaggtagacacatgtaggtagaggatccacagaggaagaagagaccttgtgcgaggcaaaactggagatgtaaagtaaaaaggtgagaaggagtgctgaaaggggtgtcttgtacccagactcctagggatccacctagggcggcagctgtcagaggttgtaatggggactgatggggtaactgcgtagagggggaggttcgattttcatggtgtatgagaaaacgttgagtatctacgagcaacctttcactgttattttcggggctgggtataagtaaacaagaagagggcctgggaggagagtctgatgagcaaggggaaggtagccaaggatggagtgaaatacagggcacgtgtcttcctaagcaataattactgctaatgtttttaagtttgtcagtattgatagagggcttgtctgtaatatggagctggaaggctccaattgtttcagtgatgtgtgtagttggacttcggagatgaagagtaaaggaacatcgagaaggtgaaaggttacccaggggaattccagtgggtctttgccgagagatacataaaggagcagccacaggaatagtagtttgtgttgtgagaggtccaaatatggggggagtagagttaatataaggagaaaggttttttaaataagtgcgaaggagggcggcagcttgctgatgtgaaatgtctggggaagtcttgctgaacctgtctagaaagtaaatgagttcttcaggagggtaaaggtgagggctgttaaaggaagttcggaggtgtagggagacgggagatgttgcccagtctgtctgtaagacggggacagctgtgtaggcactggaagaaagggaaatgcaaagccagcagttgttcgctaaggagggattagaagcagctaggagagaatgggttaaggttgacagtgtggtggagatagctggggagaggtagagggtgacataagaatgggaatgagaataagagtgagtataaaagtaaagaatagaacttcatcagggtggaagtattggagggtgccttgccagcaaagatcatctatccactttaagagggagttaagagtggcagtttggggatagcaccaagagatatcagctgtgatggcttgaagaaacagtgtaaaccagcagtgtaaacaagagtagggcatttataagtagttgagaatggagaataggagtatgaccggacagaagatagtagggatgactagttttttggggctcggcctaagtggtggggtgacttcgtaaagccctgttgcaaaaagtagggtaaggacgaacagacctaatagaatgaagggatgtattaggctcataagggttattactgttcttcagaaatacgagtgagtttaagggaagtgggggagagtacttgcgacttccaggaggaagaggagggattaggctggctgtccgatggacacagctttattctggaatggtgaacccagtggggaggatcctgcaggcggacggcagtcggggtactatagatgactaagtagggtccggtccattgaggttatagagtttgaggggtcagattcttaacaagaactgatcgtccagctaggttgtcttcatatggctggggatctggagtaggcaagagaagattagcagcctggcgaatttcctgtctagcctgctagagcactggaagatagtagcctagagggctggtgtctgggatgaggttggggccaagcaagaaagtgcgtccatataaaagttcaaatggactgtaccctgtagcatctcggggacaggctctgactctgagaagagcaagaggtaaaagtactgtccaatcctttttaagttggaggctgagcttggtgaggtgtgccttttaaaagaccattagtccgttctacctttcctgaagattgaggacggtaaggggtatgaaggttccactgaataccaagagcctgagaaactgctttggtgatttggctagtaaaggctggtccgttatcagactgtatagaggtgggaaggccaaaccggggaattatgtctgacagaagggaagaaatgaccgtggtggccttctcagacccggtaggaaaggcctctacttattttgagggcctctaacagtattaaagcagcggcagccgctgcacacagacatgagggctaggttaaaacagtaaggtcaagttgtttggacagaaaggctacagggtgtggtcttggctcttgtgtaaaaattctgaccgtgctaaccatgcctaggaaggaaaggagttgttctgtagaaggtgcttgggtttgagagattagtcggacaggattggcagggagagcacgtgtgtttttatgagaattatgccgaaataggtaacagatgaggaagaaatttgggcttgattgaagtaatgggggctgtctgtgaagctttgcagcagtacagcctaggtaatttgctgagcttgatgggtgtcagggtcagtccaagtgaaagtgaagagaggctgggattaagggtgcaaaggaatagtaaagaaggcatgtttgagatctagaacacgataatgggttgtagaggcaggtattgaggataggagagtatatgggtttggcaccacagggtgtataggcaaaacaatttggttgataaggtgcagatcctgaactaacttgtaaggcttgtctggttttaggacaggtaaaatgggggaattgtaaggagagtttataggctttaaaaggccatgctgtagcaggcgggtgataacaggctttaatcctttcaaagcatgctgtgaggtgggatattggcattgagtggggtaagggtgattaggttttaatgagatggtaaggggtgcatgatcggtcaccaaggagggagtagaggtatcttatacttgtgagttaaggtggggggatagaagaggaggatgcaaaggaggctttggattgggaagaagggcggcaatgagatatagctgtagtccaggaatagtcagggaagcagataatttagttaaagtgtctcagcctaataagggaactgggcaggtggggataactaaaaaggagtgcttaaaagagtattgtctaagttggcaccagagttggggagttttaagaggtttagaagcctggccatcaatacccacaacagttatggaggcaagggaaacaggcccttgaaaagagggtaatgtggagtgggtagcctccgtattgattaagaaggggacgggcttaccttccattgtgagagttacccgaagctcggcgtccgtgatggtctagggggcttccgaggcgatcgggcagtgtcagtcttcagcccctaagccgagaagatctgggaaggagtcagagagccttgggccagagttccaggggctctgggagtggctgccaggtgagttgaacagtccgattttcagtggggtcccacacagatgggacgcggcttaggaggaatcccgggctgcgggcattccttggcccagtggccagatttccagcacgtgtagcaagctcctgggggaggaggttctggaggaatgcctggccgctgcggttcaggcgtttggaagttcttgtgtgctggagatgtggctggggtttgtctcacagtggaggcaaggaattgcaacttttttctattatggtacaccttgaaggcgaggttaattaaatcctgttgtggggtttgcgggctggaatttaatttttggagttttatttaatgtcgggagcagattgggtaataaaatgtattttgagaataagacggccttttgaccttttagggtctagggctgtaaagtgtctcagtgttgctgccaaacaagtcatgaactgggctggatttttatatttgatgaaaaacagcctaaacgctatctgatttgggataaagaaaaaggagcattaaccttgactatgcctttagctccagccacctttttaagagtaaattgctgggcaggtgggggagggctagtcacggaacgaaactgtaagccggaccaggtgtgaggaggggaggtgataaaaagattatagggtggaggagcagaggctgaggaagaattgggacctagctcggcctggcgaggaacaacctggggaggaagggagaggtcagatgggtctgtagaaaaggaagattagaaagactcagcgatgcttggggttggtactgaggggacaggcaggagggaaagaaggaagatttgggatgagtttaactggtcacagagactaggaagggactgatgtgtaaaagaatgcctggatgtcaggcacctcaggccatttgcctattttatgacaagaattatttagattttgcaggttggaaaaattcaaagtgccattttctggctatttggaactactgtcgagtttgtattggggtcaagtggcattgcagaagaaaataaggcatttaggttttaggtcaggtgtgagttgaagaggttttaagttcttaaggacacaggctaaaggagaagaaggaggaatggagggtggaaggttgcccatagtgaaggaggcaaaccctgagaaaagagagcatagagacacggaggaggggagtggggttcttgccctccagaaaagcagagagggggttgggacacggaaataagggattggggcacagagataagaggtcagggtgcggaaataagggattggggcacagagataagaggttggggtgcggaaataagcgattgggggtttcttgccccctaggaaagcgggacttgccgctaagggtgaaggagaaggggttgaggggtacttgcccctgccccaggaaagcgggacttggcgctaagggtgaaggaccaaggcaggtgtccctgcgtggtctgacacccttgaaacgtgagtgtataatcagagaggtgtccctgcaatgattaaacaccaagggaaggctgccttcccagtctgtgaccagcgccggagttttgagttcacggataaaacatgtctcttttgtctctaccagaaaatgaaaggaattgaaattaagagaagggagagattgaagtgtggcaccaagattgaaaggagaaagcggttgagggatagtgagggaggttggagaagagagtaaaaaaggccgcttaccggatttgaaattggtgagatgtttcttgggctggtcggtctgaggacctgaggtcgtaggtggatctttctcacagagcaaagagcaggaggacaggggattgatctcccaagggaggtcccccgatccgagtcacagcaccaaatttcatgcgcgtccgtgtgaagagaccaccaaacaggctttgtgtgagcaataaagctgtttatttcacctgggtgcaggtgggctgagtccgaaaagagagtcagcgaagggagataagggtggggccgttttataggatttgggtaggtaaaggaaaattacagtcaaagggggtttgttctctggcaggtaggagtgggggttgcaaggtgctcagtgggggtgctttttgagccaggatgagccaggagaaggactttcacgaggtaatgtcatcagttaaggcaaggactggccatttacacttcttttgtggtggaatgtcatcagttaaggtggggcaggacatattcacttcttttgtgattctttagttacttcaggccatctgggcgtatacgtgcaggtcacaggggatgcgatggcttggcttgggctcagaggcctgacacaggacttgtgggaatataatccatggctgtttgactactctgaactgttatactgctgtttttctgcccagggggatgttaaagccaaaagcaagtaatcaacaagattttttttaatcttaaaatactgaattaagccttaacctttaaaacaatttttgttgtagacatagatttgctatttgtttcagacatcctttaggcttttgatctagcacatgactaccccttcttaccgcattgcccctggatcccccaaggagagacacatggctacctcctttgtaccttggcccttgctgtactgatcacagctagttaggacagctatgaaagcctgctccatgcagaactgattctgttcgcatgagaatttggaattggaatttagagctaaccagttggtctgtgtttgtcctgaacataacataaaaattaattgaaatgagagacagagagaggtgtattgttgtgggggcgggtgagaaagtagggtgagggaagggaaggagggaatgctgaagtatagagcagagagcagcagagaggtgagaaacaggaaaacattcctcaaagcttctccactcccagtccaggaatcttgcctagccttgagttacagaacacactgttatctctggataatacatttcctattttgctcaaagtcctggtgtgaatatgcaaccagagatttttaacgtaaaaagaagctatgagcatatgaatggaagttgaagacctgagaatggactaagggactcagggttagggacagaccctaggaggaaagatggcattcagagatagatagttaaaaaacaatcaagaaaaagtagccagataagtaggtgaagaactgcttgacaatcaaggaaagattggtgaattaggtaatattcatttgcataaaatgttgcccagtggtcaggtaggcgaaaagctgaatataggcagttagattttaccatttttatgtttctatcccctgctacctgactaaactattttcaaaatgtattttatagcttagagccttcccaaaattcctagtattatatataaatttccaatacatattgatagctgaacaatcatattttcctggggtttattttaataatatatgcatttattttagccaatgatattcacaaagctttgctgaaatgtgttttgtttaacttggttctgtatatttttccatgaaaagccatactaaaaggacattttccaagtattaaaaaaaaaagcaaaaaaccctgcagtccagaatgcataatttgttctgggatagttaaaattctaagagaagtcttctttgttctttccttgctctttctttgttctccaaaagggtcgtatttaaactatgggtcatttctcatctgaatagccagggaagattagctacattgctactgatgcacttgatattttctcattacataacatgtggccacagattctagccagtctgataagataaaatgttcataatacttagaagataaaagggaatcatcactacttaagatccctttaaatccaatctgttgatctgtatgagattacatttttggctctcatttactagttccccctaaagaaagtcttgatatagctactgggttcctggcttgtattttgatagtcaaaacggcagtctggatatttttctactcagtagatacaatagaagaccaaagcttcttgcattgtagtcactgaccttgccatgtcatttcatattttctgtagatttggtcctggaaaatcaaatattaagcaagtttgacagttcagctaaattccataaggtcatctatcacattacatacagtaattgattttacgttaattggtctttagtttcatggttcatgtttctggttttctggtagtttccagaaactttcgtgttaaatgaagagctatgctatgtaaataaaattcagtaaaacttccctttcattttaattatgtgcttttgaaaactaattttattgggttctttaaaaaactccgtaggagtcaggcatgaattttctactctttagggcatttcaatcatgaaagaaagaaccatctatatttttcatcatctcaaaacaattttagaccactactatttgtaggtacaaataatgttcattgatttgctttatatttattaatcacctaatagttatgaaatggtgccctaagtactgtgactaaaaaataaatattagtaagttaattttactaatttttatccttaggagctttaatttatgctagataatatctgagaaaaagtcaatagtatgatgctgtttaaagaaagaaagcaactgctatcctgtgttgttgtattagcagaattgtcaaggataaaataaataaggtgaagattagactccacttggcaatctttagcccttgattggagtaccatgttccatttgggaaggcacacttattacaacatagacaagtttggcagaggtttcaaaagaaagcaacaaaaaaatgatgaagggccttgaaaatggggcctgtaagaaaaggctgagagacgtgagaatgttcaatcttgaggaaaaaaggcagaggggacacatgataactgtttacagatgcgtaaagaggtgttatggagagaagagggacctatttttctcattagtcaacaaagacacttcaagaagtaatgggtttaaaacacgtggggggaaattcaggttaattattagattaagttaggtaaaatttaaatatttaaaatgttatgattccaagcataattaggctgtggagactaaatcacattagaattggcataggaaagtgagatgaaaacaaattcaatctgaatgcagagggttaattattgcaagtttatatttgcattaaatgttatcatatttcaaaatactttcacatatattgttttactgatctctggacattcttaggaaagagagagtgtatcagctagttttacagctgagaaaatggaatttcagagaggcaaaatgttgcttcgaacccccacactccagattagatagacaaaactgctaagtgcataggattagacaagcaggactaaaagccaactcttcacattttctgtcaatatgtttcacatggtaccttgctatcttttcatttgtaatatgatttctattgtggagaaatattgtttacatagaggaacaagaaacatgattgaacttatatctgcattacctatatctattatttatctctcactactcacaattgtgaaataaactcagcactttggtattatattttgacaaatcattgccaaacgtaatacaatctccagttggtatgatgtggtgagaccctaccttctaccattacctagaggtggagacacatttcatcttttatgaatttcatattcctcatctgtaggaagaaaattataatatcttctggtttcttctagttttacaataaggagtgaatgagaaaatacctgtagaagtacctgaacttgttcaaagaaataaacttgttcaaagcataaactttgcttggggggaaatgtgtgttgtttttggtgtactgtggattttgataatccctttccagttttattttcaatcctaccttttttttttttttcatttcctaatttcagattcctgaggtcaaggccaatgtctttgttgaagcacttaaaatttgctagtctaatgtaggtgttcagtaatagttggtgggtgactgagttaacaaatggatgaataaatactttcagttggatattatgtctgggatatgagcaagaggtgataaatgccatatataatcatcttgttatactcctttatgtaatgatgtatgtttaaagtattttatagaaacatggtatgccagattctcagttagatcctgagaatacaagccactcaaagtctaaaggggttttgcagaccactccaatgctaggtatagacaaaactcttcccagcaaagcaaggtagctgatgccaaaatgttaccaaggaaagacccattggttggttgccaagacccttatggagtctgagaagatgttttagactccctcaaccatgcacacaaattgtgtaaagtaatccaggaggcagcctaaatggaaaggctgttagtatgctgagcttgctaggaaatggaggaattttacggaaaatgtcagcctctgtagactcctgtgatgctcgctagggtgccagccttccccagggagcccacagcacctggcaggcagactgcagcagggagtctcactgggaggatacaaaagagcttaatggccccctgtgcataatgttgaaagaggctgcaatttttgttttcttcggagattaacgtgtgtgtattgcaggttcaaaatggtaagaatcttaattagagttgcaggaagttgcataatatactccatgtcttactttttccgcacaccaaataacagaatctatttgccaaattatgaaggttgatggagaatgaaaactgtaatttgagtaaatgggagccctgcccccattttttccagttagtcacaaagtttaaaatgcaaagaagtaaatctcccaagggagcaattctatttcatctgtggaagaaagacatatgttgttactgatgaaacctctgttgtgaaagcagagccaatgctgggaaaaacttgaaggaaaaactagctgagagccctctgtctcaggagcctgtggcctttgggtccacccagggctgcctgtgcctcttcctgaggcttttcttgaaggcctgctctttcctctgattaccttagggcaattgcctgcctctcttaagagaaaatgtacctgttttgtgccacatcccttcaggcccctgagctggacagtagattgatctgacagatgtcactttgatattaaatcaatagtaccaatatgtttctgggttttcctggccttagcaaggttttatgttcacttacttagagacattctggagaatatctcagaactcaaaacatgagatcaaattggagttctatgggagagaggatattgaattacttggctttattatggctgcactcatagggccagccacgtgtaaaagtttcattctctttttttgaacaaatatttattgaaaacaataaattaccaagaactgtgttaaaatatacagatgtctaagcagacacggcacaatctatggccctaagaagtctaggaggtacaatattttatataaattattcatcttcattcaaagttatttattgagcatctactatgtgccgtgcactgtgcatgcccctggaaagcataagagacaaaattcctttctttgtgggagctgtattctagtgaggttcagcaggtgaacagcaatccgtgttaattatttcttcttccactgaaatgaaaattctatgtttctaaaaaatattataaaagtactcttcaaacctcatattaagaaagtcaaattgtctttagccacatttgataaggattaaagataatcttactattttattttaaacatatttagagcagtccttgtctgaaggaagcttgtgttgaattttttataaagtgagttaattaccttctaattaattttgtgtgtgtgtagtgctcacctaacacaagattttcatgctgaatttgctcccccaaaagaaaaacaattcctatatatgttgtaaagggtcgcaagtcagaactgagatggaggcaatacaaatatataaccagcggcctcagacaagttcccaaaattgggaagaatgaagagatagggaatgactgcagagcctttttcaggaaagcatgagattggaagatgaatgctcaagtaaattagaactcaggaaaagtactgaacagcaggatcatatcatcaaaaatctggctgataggttttgaactcactgaactgaatctatttagaagtacattttgggaagactaaataaacatcaacactatggtctattctaattcaggctcttgctttgtctattttccaggtgataaaacactgattgttattagtgttatcatcaagcatattgagcagtcaatctgtaagttaatagcaatacacagccatatagtcctggaactagaaggaaagaaaatgaattttttcttttttttttttctttttttttctgtagaggggaagaaaaattcaacaccttgagtcagctgcgactcaagggtccattataacttcgagatttttaacagcctgtgcctagggtatgggagatgaattttgttccaaagtggtgacatgggcagatataaacccctgggagcaatttcaggcaagttgagagtccattctaaacaaaaatggacagaatgtggaagatggaattcccacacttgctttctgaccttggctgatattcctcagcagttggtaattagaggaaatactgaagctgagaggatgaaagaataaagaagagtagaataatcagaattgaaagaatgtaaataagtaataagatggggcaaaaacaggaatggtgtcactgacaaaggtggccacactttgcagtaagatgtgagtgggacatagaaactagatttggttgagtaagaggaaaaccatatatacacacacatatatatacacacacacacacacacacacacattaatatatgcatatttaaaaatatatacatttcaaaagctcatttatgttgaatactaagtgggaaattcatcagctgtttggcttcctgtctgttttattctttgccattgcagacttgagttgtcttcctgaaatctttctgggagataactgcatgcccagcccttttctttcatcagaaaaagggtattctgccctgagtcagaagcagggggaaaatagatgataatatctacatgttattgctagaacagagtcaaataaaaattaaaagtccatcaagtgatcaggttgaagtcaataaaaaggtcaataaaaagcaaggatgagccaaaaaagaggacttggtgtactggaaaatgccaggaaaaataaaagacagaaaaaacactgtggcaagatcttctcctgtggcctcagggaagtgcatgataaaattaattgaagcttatcacccatgaaaaagggctacagttggagcaatagctgcacggactacataacagtacaggttctttagcctaagacaaagataacagatttttgttttacttttgcaagcttttttaatatactgagttaaaactctctttttttgcctttattcaactgaatgctgcattttttgagcaatactaagtgttgattggcttacttgaacagcaatttgttaagaggcctgctgtgtaccggccattatcctaaataccagtgtacaaagattagtgatgtgtctatctgctttcaaaactcttataatctgtagcaacatgagattaatttttacatatggtttatatataacaatctaattccaatacaatcatatcattctccatatctcataagaaattgttttgggacattatttaaagaaaactttatacaataaatctataaattgttagtagatttgactcctcctttagatgaaagttttcatcttgtcgtttttttaaattcaaaatatgttattttaagttgatataaaacaatcatattagcaaaatgcatccacattgaaaacttagctggatgggtaaagatcgctctattaaactgtgatgtttaatactgagtgtcaacttgattggatttaaggatacaaagtactgatcctgggtgtgtctgtgagggtgttgccaaaggagattaatatttgagtcagtgggctgagaaagccagaccgacccttaatctgggtgggcacaatcaaatcagctgccggtttggctagaatataagcaggcagaaaaaggtgaaaagagagactggcctagcctcccagcctgcatctttctcctgggctggatgctttctgcccttgaatattggactccaagttcttcagttttgggacttggactggctctccttgctcctcggtctgcaggcggcctgttgggaaccctgtgatcatgagttaataaactcttttacatgatattctcatgatagtgaataaatttcatgagatctgatgggtttatcacgggtttctgcttttgcttcctcctcatttttcacttgctgccaccacgtaagaagtgcctttcacctcccaccatgattctgaggcctccccagccatgtagtactgtaagtccaattaaatctctttttattcccagttttgggtatgtctttatcagcagcgtgaaaacaaactaatacaggcactgttccatctccaaatggtcataatttatcagttcaaaggaacgtactttgcatgccaccaaagggttttctaagaattgggtcagcaattttaagtcaaggttgttggttctgagttgtacctttgagtcagtctttcagcattttagttctcaaatctagttttctactctttccaatggggttattcatccaatagacatgggaaaatcatcctaatcaaaacaaatttatgatcatttctctctggcatgactgcatcaggtagcttaaaccatagaagtttattgtctcacaattctgaaggctagaagttcgagaaaaagatatcagcaggattgatatcttctgaggggctgtgaggaagaatctgttccatggttcacccagcttctggtggtttgctggcaatctttgatgttccttttgcagtgtcaccccattctctgccttcgttgtcacatggcattttctttgcatgcacatctgtctcttcatatggtgtttcttttataaagacaccagtcatactacagtagggcctcaccctaccccattgtgacttcattttaatttattacatctgcaaaatccctatttccaaataaggtcatattctgaggtatgagtgggttggactacagcatatgaattttggggagacataattcaatccattataatcatactgcataactgacgagaaagtaaagaatcaatctgatgcaggaaagataacctaatcaaaaagaggaattaaacaactccaactaattccttacatttaatctatttaatataaaattataattttgcaaacacagcatggtgcactatggtaactaaagcaattggatgatatttcaaaagctttaataactagtatttaatcacagatgctgtgtgtttttacctgaaattcatcctggtaatgcaacataattaattgcacaatttattttagcatgagttttcttatatttatagagatagcatagcaatcttgttttcaaatttccctcagaatgcttgagatcagacattattagcatggagacaatagtttcattgtcaactcctgctggtttgggtacatttacagtaataaccacaatccactagcttgaattattgttcaacattctatgtgacttcatgagggtattaatatgcaagagagttatttgatactaatcaaagatacacatttgtcttcacacttattacaatatggtaaggtaatcacataaaatacttaagatggtagacttcatacatatatatatatatacttttaatgaatatactaaagctaaccgttaatggaagctttgacagaaactcattgttcaatatccaagcaaatcaattttggactataaatgcagaattctaacaagcaaaaattctaatcattcattttatttttctgttattcgtggcttcttatattgttaaggcttaacatattaagatgcacataggatttaatcttcatgagagagcaatgaatacatcattgaatacataccaatcatgtgtaattgttttcatatgtatgtaagcccagcggaaaagagtcgttcattgacagtactcattttcccatttggtgtattttcctaattgtacagtataacagttatagtaaatggttataaatattaccctttagctgtaacatctatgacatttttgttgatcatgataatatgtgattgtttagtcaactgagtttattgtaattgagattggaaatcactataagagtgaaattgaatatatagatagagaaataggataagttaatatggcagctcaacactgaacacagactacaacttcttgaccaccgaaatatgcaaaatattatataatagcttgtatctggacagcgtgctaagctgttcacttgttctttatcatttaatcctcttttcaaatatgtgagatatgttctgagaagataagcaccttgttgagtcatacaggtaatacattttaaaggaggaatttatatacacttaagattgtgtgtgtgtgtgtgtgtgtgtgtatgtgtgtgtgtgagagagagagagagagagagagagagagagagtttcaggctccaagacagatattaatggtagactgcctttgttgcataactgtagcagtggtgtacaactgctactcccatcttctcagtacttcatctctttctttgaatcaactacagctattctgatggctagattatgatctgccagtttgagaatccaactcttgctggccagagacttacagttaaaaaataaatcatttagagtcatatgcttatgtactactgggctgtgatcctcaccctaaagctcactttggcatagctctttacttgccatcgattcttgacagccttatttcagaattcttacagacacagtgtctatttaattttaatacaatcaagcaatggtttctggacatatttggctatttctttgaaaacaatggaatctgtcttatgggcaaaatgacttttttctgccctaaatgctgacactgaattgcgttcaatcatgacagaatttgtgcaatatgaaaagtttgtccactgggtggacaatttctatctagcatttttctctccttcagggatggactttaagttgatttgacaaaattggtttcatatgaacccaaatgcaaaccctatattatctttaaacactggtttctgtgaagttgtttgattaaactaatactgttgactccctgttttctgttttatttctttaagatgacatcccttattctgttctgctacctgggacattgctcttctctccatattaattaattaatattgtttcctaaatctgtcttcctagtctctgtgtttgtcttcaccatgtgtattgggatatattctcgaagggtttcatgtgtgaattccctcttgagtcaaattgtacatgtaatttcccttcattttaaaaataaataagaaatatgagaagaattttcaaaacttttatgttctatatgctttcctctggtttggaaattaatctctgaatttatttatattttaggtattgcaatttgagaattagaagagttgtttttacaaaacacagaaaacagcttttgttttaattatttttcccagtgtgtctaagagtcaaaaagactctgtattagtattcactggcaaacagaacacaatgcagagcagatatcctagaagcaacatgatagatccaatcatccgattcattatagtacaaatattgtaatcaatcataatattcagtgttccataaatccacaattctgtgaaagggataagaaaaaagaaattaagctatcagtgagtttactaaaaaaggaaaagagatttcctgattatcatcattcagaattagtcagacatatacatggtaatcattcatattttaagcaataaaaggaaactcaacacaaagcctggaaagcaacagccttttatttttattttctctaagatgtgaaaaaatagacctaggtgctaatttaattcccttttaagttaatgacataatgggtttgtggagcattaaatagggaataaatatggccttacatttccatgtcggagctaaatgctttctcttccctcagcttctaattcctcagctgagggaagtgatcagcagtcaacgatcacaatgagggagctacgcacacatcctctggtttcctgagctttggaacacttaatgcttagtgcagcttctctattttgagttctaccatgaacccctctctgatgactcccacatatgtcttttttatgtaagcacaccaagttcagctatccctgtaggtagacagcatttgagacttctcagttgggtatgatttgagaagataatggagctgatcctcttgacataaactagcctattggtcctgcccaaactggtgttccctggaacagaggcctaaaaacaaaatatatttaaaatgttcaaatatatttagaaaatattgtgttaaatcaagttagccagatttttgttgctttcattgtcatttttgttaatattgttgcatgatttccagaatattcagtatgcaaataaatattcattatgaatttaacaaaataggtattttctaaacttctttgaccttggaactcttgttctcccttcccaaccccaccattgcacttattttaacattgcactcagcagggctatacgcatcaacattttgggaatttgaggatgaagatatgtttttcctattaaaaatgaattcttatcccactgggaaagaaaacacattaagcttttatcagtctttaacattttaacatggattagccattctgctctttctggattataagcagctgagagcaggctttcattatagggagagggaaagatgatctgaagtgtcatgtgtccccagagaggattttcaagtggaatgccaccatgagagttcctgggctagcagaggacaacttcatatagtgcagggttgcagcaaggccactgacaccagctgtatatagaaagttatgtttgcctcagtttcttcagccaaaacagaggaaatttactagatagtagctatctccctcttagctctaacaatacaatctgattatcttgatggctaagtgtgggaactgagagagttagaagagtgggggtcactagttgaaaaagcaaggttagaaatgaatgttttctcagtcatggctggcctagggctggctctgcaggagttcatgattctcatctccccaaacaacaaagagccatggaaaattcatcagataacagtaattcaacagataacagtataaagactatacatatttttaagatagatttaaaaaatgcatgacatatttctggcctccaatgagtgttcagtatgaaaaaataccaactagatgaataagtataggcaagcaaaagattctaagtataagaaagtgtgaaaagtaaaatttattttatttttctttgaaagagcagtcttcccaggtcaagagattagaaagacaagtaaggtaatgcctcttctctgaagtttagaacagatgaaagtgacacataaaagcagaataagataaatattatatcatagtaaaaggaatgagaggttgtatgtagagtggttgtggacttggactcaagagcatgtggacacaaatttctaggttaaattccctggattcagaacccatttctaccatcttactaggtctgtgtcctcttgtgtaaatggtagtggtgatgataattaccatgcctttctgctagaactattattaggaggattaaagaaaattaatatgtataaagcatctagaagagtgcctcacataaaataacaaacataagtatttactatcattaataataaattatatccaactagaatcattataaggggttttagaaaagaagtagcaataagataataagtgaagaatgagtaaatttttgaagctacaaatggattgaacatagtactctagggagagggacaatcatgaatgaatacatcaagatgaaaagtcaaagggtaaattttagaaatagcaaatagattggtttgctaatataacatactggccctttactgatcatgttgatcattttgtgagaaaacagtaggaaatgacttcagaaagaatatagtttggtaaaaaccattttaactgtaggagaatgaaactggattctcatctctcaccttatacaaatatcaactcaagatggatcaaggacttaaatcaaagatctgaactaaaaattctagaagataacattggaaaaacccttctaggcattggtttaggcaaggatttcatgaccaagagctcagaagcaaatgcagtaaaaacaaagataaatagatggaacttaaccaaactaaagagcttttgcacagcaaaaggaatagccagcagaacaaacagaaaacccacagagtgggataaaatcttcaaaatctatccatctgacaaaggactaatatccagaacctacaacaaagtcaaacaaattagcaagaaaaaaatgaacaatcccatcaaaaagtgggctaaggacataaatagacagatctcaaaagaggatatacagtggccaacagacatattaaaaacatgctcaacatcgctaatgatagagaaatgcaaatcaaaaccacgacacagtaccaccttactcctgcaagaatggccataatcaaaaaaataaaaaaataatagatgttgaagtcgatgaggtgaacagggagcatttcttcaccgctagtgagaatgtaaactagtacaaccactatggaaaacagtgtggagattccttacagaactaaaactaccattagatccaggaatctcactcctgggcatctacccagaggaaaagaagttattatatgaaaaagatacttgcacacacatgtttatagcggcacaaatcacaattgcaaaaatatggaatcaacccaaatgcccttcaatcaatgtgtggaaaaagaaaccactgtatatatatatacgtgatatatattgcatatatatatgtgtgtatatgtatagtatagatatatgtatatatatagtatatatacacatgatatataatgtgtattatatattatatattatatataatatatataaatatatattttatatatataaatatatatgatggaatactactcagccatacaaaggaattagttaatagcattcacagtgacctggatgagattggagattattatcctaagtgaagcaactcaggaatggaaaaccaaacatcatatatgctcactcaaaagtgggagctaagttatgataatgcaaaggcataagaataacacaatggactttggtgactcagggggaaagggtgggaaggcagtgagggataaaagactacaaatagggtacagtttatactgcttgggtgatgggtgcaccaaaatttcacaaatcaccactaaagaacttactcatgtaaccaaacaccacctgtgcccagtaacccgtggaaataaaaaataaaagaaatttttgcccaaaccaatgtcctggagtgtttctccagtgttttcttctagtagtttcatactttctggtcttacatttgagtctttaacctatttaaatttgatttttgtttatggcaagagatagcattctagttttattcttctgcatatgtatatccagttttcccagcatcatttattaatgagactgtattctccctaaggtatgttgttcacacttttgtcaaaactgcattggctgtaaatatgcagatttatttctgggttctttattctgttcttttggtctatgtgtctgtttttatgccagtaccatgttgttttggttactatagctgtgtagtataatttgaagtcaggtaatgtgatgcttccagctttgttattttttgctcaggatgtcttggactgttctaggtctttcgtggttccatatacattttaggattttttttcgatttttataaagaacttcattagtatttcgatagggattgcattgaatctataaattactttgggtagtatggacattttagcagttactgattcttttaatacatgaacatagaaaatgtttttatttttcatatctttttcaatttctttcatcaatgttgtattgtttttattttagagatttttcacttctttagtttattccaggtattttattttatttgtggcgattacaaatgggattactttaattatttctttttcagattgtttgctgttagcatacagaaatgctactgatttgagggaaactcttctacactgttggtgggaatgcaaattagtatagccgctacgaagaacagtgcagaagttccttaaaaaagcaaaaacagaatggccatatgacccagcaatcccactgctgggtatttatccaaaagaaaaacatcagtatatcaaagagatatttacactctcatgtttatttcaacactagtcataatagccaagatatggagtcaaactaagtgtccatcaatggatgaatgaataaagaaaatgtggtacatattcatgatgaaatattcagccattaaaaaagaataaaatccagtcgtttgcagcagcttggatagaactgaaggacattatgttaagtgaaataagctaggcacagaaagacacatattgcatgttctccctcataggtgagaactaaaaaaattgatctcatggagacagagagtataatgatagttatcagagcctggggaaggaaatggggagggggataaagaagtgttcggtaatgggtaatgggaacggaagtacaattagatagaaggaataggatctaatgtttggtaacaaaatagtgtgactataattaacaataatttattgtatatttgaaaataactagaagagtggaattggagtgttcccaacacaaagaaatgatgcttgcttggggtgatgcatatcccaattatcctgatttgatcattatacattgtatgcatttgtcaaaatttcacgtgtggcccataaatatctacaactattaagtaaccatgaaaattaaaaattttacaatttaagaaaagttaacttgacgagaaaaagaatacagtttggaagtcttcgaggatagataggaagagattttccatttaatttggttttaaatgggatcttgtctatgtttgctcagggtaatcatatgaaaggcattataatttgaaagcttaatctcaaaatagtactttttttggtaaccagttgtcttgcagcaaaaacaaaagcactgaacttgggtcaaaatacgtgaattcaaatccatactttataccttcagaatcaaacactctaagcctcattgcgttactctttaaaataaggaaagtgcatctaaattacacattgtttttagtagcaaataagttagatgaaaaagcatcaaatgtaatgttgggcatacataaattttcaatcaacttttaactatataatattatctgaacaagacaagtgaagaatacaattgtaattttttaaattgcaaggcaacagtttctaccctaataatatctacattttcctcataaaagtcagtgcatcagattctatacagtatgctcttcaaattcttggctccaaagttagcaaattaaacatcccatctcatttctagtttgcagtgaaattctcaaaaagtttccagaatccctgatgttactcatcctgagctacatctgacttctaatcagcatcttttacttagaatacagatagcaaatctggttggcagttattttccaatgattcttctgccatactgatgctttataatggctccaaggaaaggccattctacaaataaaagcaaaattaataaaagaatgcgggataattgacagttttgctacaacagcatttaatttgaatcctttgaaacttactcttcactcattgatttttaggctcacaaattctttgtgtgaattctctcttttacttttgcattgtgaaatgatttatcatttgggtaattttccagaattacactttattattttgtaaatggcatgcagcacagatggatattagcaaggtctctgtataaacgccagcaatagaggtggtaacattgccctgagagttttctcctgaaacaaatcaaataaagaagagaaagcattgccaaagctggccatgacagaggaagtggatccaataatagacatctcgatggatacatatatatgattcaatattgtgtgacctttactttcaaactcactttcagaaaatatattctaaaggggtgccaaggatattgctgtctactctctactgacttccatgaaaggaaacaccattcctctgtatctcagtcatcaatgagtacatttatgaaagagtttggccattgtcaattctaatgccgttaagaagaacttgagcatagcttacatttttttcctcattttactcctacttgtatattgctttggcatatactattagtgcaatgctgtgacttccaaaacttctcagaaagtaacaacttggactgttaagagactccagcatttgaaatatattttaatgcaaactgtctccctgaagacctctatccatagctaagatagttgtatccgaaagctttgcgcttacttctttgcagtgctatttgtaaacattggcatagtaagagtgataaatttctatggaatcatctttatcaaacatacattatagaagtagaacttattccagctaaccacattatcatgaatagcattttccatatttctttgaaacaatacaatagaaacaatattatcttaaacattaagtatccccattgattggtccagtgaaatactgcttggaatgaaggcttcaactttaaatctatttaatcaaatttggtaaaacaatcatggatcaaatatattattaatgttacgtggcttttattattattattattattgcaaaaattaggagccttggtttttgtggccttattctatttcagttagatataatatctcctggccttgggtgctttttacatacaaatggggtaaaatagttattataaagaatagagattgaatagatgtgcttagagtaatgtctgacacaaagcaagcactcggcccagcacagtggctcatgcctgtaatcccagcactttgggaggccaaggcaggcagatcacgaggtcaggagttcaagaccagcctggccagcatggtgaaatgctgtctctactaaaaatacaaaaaattagccaggcatagtgccatgcacctgtaatcccagttacccgggaggctgatacaggaaaattgcttgaacttgggaggtggaggtagcactgagctgagatcccgccattgcactccaacctgggtgacagagcaagacctcatctcaaaaaaaacaaaaacaaaacaacaacaacaaaaaaagcaacggctgttaattgccaggaagaagagctcctacaattgtttcatgtgcatttaggcactctcttccatgtgagaccccaagcagtcagcaggactatcaaaggaacccttttaagacttagatatctatttttaattcttgcactgcatttctactttgataaggggaaaaggcattaaaacacatttttgaaatgtaaatttccaaagttacaaaaattaacccaacacatcatatgctctttgaatcacttaaattggcagctgtcttataatgataaaagacctacggcgttcttagatgatgtctacatgatgccagacagctaattgaattaaggaattaaggaagatatcaactagtccttccccttatttgccagatgaagaaatggaggccaagaaatgtgtagtgatttatttacatcaggggttgagtctgttggtcgtgagaacttctagcctagttattttttccaccccatctatctgtcctgaaatttggtttcttattgctgcagcattgaagagatggaaccactaaaaaaatactgataaaaagatgtttatccagaggcaactttaatggcaactcaaactatttgaaatatgatggaaaatttgttactgagtgaaaaggccatcgcacaatcaaaattgatgtttaaagctcgcctactaactcttccacactatccaatgtagtggtcctccttcattttgctctttagagtttccctaattttctttatgcatgcatctgatttcatcttactttagagaaaatactaacagtgtatgtctagaacatggcagattggagccttatagcacgagaggcagggaaaagacagctaatagcgattcactgataggagaagaaggggtcccatattgtttgagttttagataacgtttaatgatcttcctggataacagattctatgaggattttttttttttgcttgtttaaataaaagctgattcaatgataacaaaaggagagacagtaacttcagaaaaatatagatatgctaattcttacatttgtagagcccttttgatattaaggttcaagatctaaaaatgtaattctcattcaagaccgtataaaaattgttagttctatataagcatattgaatcactgatagattaaagcacattcatcatactctagaaaacaaggaaatgtgtaatatatttgatgtcatttttattacaattgttaaaatagtgaagaataaacctgttaactagaaatctatgcatgcagaatgtcttattacctaaataacaccagataaatgaggtgttactgtccacagtctcacaacagagacatgaaaaacccttctttacactggtaacccttaattaaactgaatttttggtgtgtcccttcaggagaaggtcaccatatcagcaataattaggggaaatggcattgtgaacattactggatgagatgtggtgtatttcttactttcaattattgcctccttgtttgaatcattagcatttggcagatttgttgctgaatttgttgttctgatttaaaactcggtgtaaggttgaatatgttcttatcttgatcttatatttctgccatgacttgcatttcttgctgagtttctgacttgaattgctctatgtttttgctgagcttttgctttgtcttgttgtatttctatctggaggggtttccctccgcctttttctttttgttatatctcttctttggcctattgtatttctctggcccattcattagctttttttttcctttaaagttattctcttgttcagtatatgcagtacctaatcaatacgcttccttgcttgctgcaggatttccaacttactgtgttttctgtcagctttgatactgcctgagaggggtttctgtgctttggctaatatattgttgtctgaattcgcagtgttttcagctcattacactgactttaattttgatgtatttgtattttatccagttcaagtcatgtttctttcctctgtcaatttaattactttctgcctgggcaacattgtgtttatacaattgctgctaaagcgacaaaaggtttctatttaaattaccacccagagcatcagcaattcagcctaaaaaatatgcagaactcctctgattgatgtcttacctttctgtggataaggaaatctagtctattgagaggatcttctttatagaacatagtcaagcctggtttatagctgtagagtcattaacagaggagatgagtgtagggctatggggtcactgtatgacttctctgtaagaaaaaaatgtatgactaggttctattcagtacaagtcatgtcctaacagcaggaaaaagaaaactttcttaggtgtttaacttatatttaggtgggctacccaagctccagctcttatttttctatgtgttatatatattatacacatttctgggtttgaatcttgttctttctaataattttgcattgggctgtgtaagtcaggaacattgaatttccattgtgtacataaaactatagcaactggtctaaaaacaaataatgtgggaaacatagtaactgttcctgttttcaaaggcttacaataatgcgaaaaaaagggaaaagcttatgagcaatacatctttgaaaacagaaacagtgaaaacactccagtaaatacataattggttattaatagaattttaaattggagaggcataacaattgcaacagctcttggaaatgcttaggaaactgaggcttataggtttacccgaacatatgtcatagataacattaatcaactagctgatgaacatgaccagcaaatgcattgattgcctgatcagcaaatgcttcaactgttttgttttacaagacttaatatgtttaaacaacaacttactctttacctactttttaaaaatatccttctgtattttctgcaacaaaccattgttgagtccctgtgcttaacaaaactgtgcaactgtgctatttacccagaggaagaagaaagatttttttaagtcagttcttttctggtaagtgtaacttttctagtattggataatctttctgagcctcagttttcttatctgtataattggcataaatgaaccatgagaaacaaataaaatgacatattcagctcagtgtgtgtcacatggtgagagacccattaagtttgctcttttccttttgcctttctcttttcagtgttcagtcattatactgtcaaataaattggagtttctggcttttctcacactcaagattattatgatatactacactagtacatctgaccttgataaaaagcaattttctatagtttaattgtatagcaataggatgggaaagtctctgattctcactctgtagcttcttcttcccagggctggagtcatttaatctctacctttaggctcattctaccctggtcccttgggtcatgaattcatctggaagattcagacttatgctttaaggctctcagaaactcaatcttgcagaagaatctggcctccattttgtacacactttgttcaaagagcctcctagcaccttcccaagacccacatataccactcccattttctctcttggttctggtgattgactctctttatgttcttggaaagctgcctagtatcctaaaaccagtattgctgcctggctgttaccaggctgcaccctcgactaaagttgatcccctgcactcatctttggactctagatttctattacatgcacatcccttgtgccaaattatgctggcttgtctggccttccaagtttcacctattgttatgcttatttgtcagttcaagtctctattccagctctatcccacttccttctttctttagcctgtgtccctctcttggatccctgaaacattttgagtactagctactcctatgtcctgcccatgtgattaagaatgatacttttctcccgtgcttgcagctgggtagtcatactccatacccacccaggtaaaaatgtctggatccaaatctacctttcataacagatctgatgtgctattctagacagctttactccatgatatattgcagactttatgtaggttaacaaagcattatggtgtcattcttgtgacagccctacattttcattatgatttttgtgtttgcggtcctttttgtgacaatttcttttagatgaaaatgcttttaatgaagcccttttggtacttgggagcctcactggaatggatttagtacaaacttgccttatttcaaatttatgttcaatattgaacaacactgttacccatatttaggacagtagacaggtaaaggttgcagaatttttatgaaatataaagcaatatccactgttataatgaagcactacataaaattgtataatacgtgagtttcttattcctcaaatagtctaactgattgttcattgggctcactcagccaaaagtagagggaaactttgtacagacatcattagtttttctccatttagagattaatcatgaagagctctggctctttaattctgtaatttgtatatttaatgggctgctgcagaatctatgacagtaattagcatagcctgaaaactcattaatacgcaacaacatgattaatgcagcattaatgcaaacatgactgaagttatttgggttatgtagtaagaagattaaagctaaaatgtcctgtttgttttaccagtggtgagtataatagagtggcaaaaaaataaaataaaaacaggtatcaaattagctgtttaaaaaaaagaaaaaaaccagcaaaatttaaatcaaggtgattttatttttcccttaggtctaaaatttgggatataagttatgttctttacttttatatttattcatttattcataaatttatcattactgaaggaaagttcattcaaccttttagtttaacatagttaaccttttagcagctttaacataatattattagtcttacattggaaacaattttaaattgtactaatctttgaccaatacattacacatttctgttttgaaactaatatatattattggctatgccaaataattaaaggatttgttcctacttattcagaagttacatattatgccctcttctcactgtgttcacctcttaaataaatgttcaaatactttataaaatactaccataaaactcatttttttaaacaaaactatcaaatatgacatgttaaatactgaaataatcaataatgtttggggatgtaaaagtatataagttttgcttgttcttgctgtctcatgtaatcatattgaagtcctctcattcttacttttttttggcttttcttttttgagacggagtctcactgtgtcgcccagactgcagtgcagtggcgccatctcggctcactgcaatctccacctcccgggttcaagcgattctcctgctcagcttcctgagtagttgggactacaggtgcccgccaccatgcccggctaatttttgtatttttagtggagacgaggccgggtgcggtggctcgcccttgtggtcctagcactttgggaggccgaggcgggtggatcatgaggtcaggagttcgagaccagcctggccaagatggtgaaaccccgtctctgctaacaatgcaagagattagctgggcgctgtggcgggagcctgtagtcccagctactcgggaggctgaggcaggagaatggcgtgaacccgggaggcggagcttgcagtgagctgagatcgcgccattgcactccagcctgggtgacagagcgagactccatcgctaaataaataaataaatacataaataatacagacggggtttcaccgtgttggccaggctggcctcaatctcctgacctcagatgatccatccaccttggcctcccaaagtgatgggattacaggcgtgagccacagtgcccagccattttttttttttttttttttttttttttttttgctatttagtatgacctgttttaatagcggtcctaaactttaaatgacttatttttcaatcttatagtcaaatgtcaagagtcattaatagtatctcaaacaaaacttgcattttaaggttaagcaatcctggatgactgaaaaaaatatgtatctgcttttttgtacttattttattctaaatccacattagaaaaatgtttatgattttattctttttcaataaaaaaaaacaagtgaatatccacgaagtacctgactcttggctaggtgttgaggaggaaaagcaaacccatcaatgtctgtgcacttggaaataaccatctgggagaagagaagctcctttcaacctagggatgtctatagataagaatgaaattgcaccatagaaagaaagcatatcaacattgcctgctaccaacagatggcactgttaatggtttgtatcacaactgtatttgtgggaccaatagatttgctaacattctcagaaggtagtctggaaggagaagagcctctgttaaggcagtgaaatgatatacatgctcaattttgtttaattatcttgtcaaaattcctggaaaaaaataaaaaaatatatttatatgggatatttcgtttaattaaaatacatcatcttttaccaaaattaatatatgtgaaattaaattgtagtagaactttaaaacaacatagagttcctattgctttgaataattggtctttacatttagtattatattatatgttatattgttatgtataccatatatataatgttatattatatactgtaatattagagtagcaactgatactcacaaagctaaacaactcagttccactgaaatataccagattttgacttagttttaaaagggaggacctagaaacagagagaaaatgcatcagtgggtaaaatcatttacctctaatgttttatttcacctctatggtttttagtgtactagagagctgtttaatcagaccattaccaaattgaataaatggctacttagtgattactgaactatttagtgatggggttggggagaactccttttttaaaaataagccttttgaatagttcatataagaccatcctaataaataaaatggaacagaatgtgtttgccatgtaatagcttagtgatttttaatttctgtattgtgatgaaacaaccagcttttctagaatgtagccagtcctttgtttctcagaagctgtgcacacttgcggcattcagtcctagtgctgccataacagagtttctaaacactagttcagaaatgagacatttttgtttagtctctgtttgggcacagccaagagtttaagactgtacatggagagaaacttgcttttttctgtggatgtaatccaggggacctgttgaggtctttaatgggtggctgacaggatgaactgggcattcaatattaaagggtggtatcatagcaagggggttaccccagcagagtttgtagatcaggaattgtttagagcctagatcttgggaaagtgaacaagaagcatgttaactaaagataaaaaacagaaaccaggtattgtctttttaaactctgagctcttggagtggcgatcatgtcttttccatattagtatctccagtgatgagcattgtctgttggagacactcaatatacatttcttgaatagagtaaggatttactggactttgacacagaactaaggttctgtgtgatagaggtctgtgtgcttatgagaagctggactgtgtaggtgaggatgctaaggctcctgttcccatagagaagtccttgagatggctcaagctgctggttcccttttttcttggactttgcaggtattcaaggtgtctctagttagaagctttatgttttgtaatgggtaaaaatagtgctaaaatatatagctctttgctatttataccaaattgagggtctctcagaacaaatacagtggacggattttaataataatagctaatacttatatagggccaaatagttctgagtacttttcatgtatttaactcatttaatcctcccaaaagacttgtgaaagaagaaactctcgttgcccacttctagaggaggatattaggtgtagaaaagttaaacgatttgtccaaagttacatataaattaagtgcagaagctagtttttgaaagcttggctctagcatttgttttttaatcattaagccaaacatcaaattccccttcccacactttttttttcacttttaccaaagaaatatcttaacaaaatgactcctttggaggaggaatacatgcatatatatatctgtgtatacatgcatatatatatctatatatgtgtatacatgcatatatatatctgtgtgtgtatatatatatctgtgtatatatatatacatatatatatgtgtgtctgtgtgtgtatgtgtgtctgtgtttctgtgtgtatatgaggtcagagtgagggccaagaagctattttttctctaaagtggttcatatattgcaagtgatttaattgagggaagatatagttgtattagctaaaacacttaaaagtttataaataggtgtgtctacacaaaggcaaacattcctctaatttctaaacagtttttacttctattgaattgaatatgcctaatattttagtgtcctgatgattaaagtatgaggaatgaattaataaccaggttcaaatatgtgtattgttaccatgcagatctgttaatacttattaattcccacatcagtgtgaactaaggaaaatgaaattaagttgcattaagaatgtgctcagttatatataaagatttacttcctgtaagagtgattatataattatatggtttactaaaatagttatgagattttattctttcattcatttgacatgcattattggaatcttagtattttcaaactacgtatttggagataaatattgcagtctgaccataatgatagtttaggtattccttggcctggaaggaggacactagttcattttattaacatgttctttgtctgtggagagcctccacaatgccattttagtaaaatactggatctttactaaaccatggctaccaaagacaaagtgtcattctaggcagccaacagacttcttgccctactcctgacaagcaaaataaaatagcctggggtaagagaggtaatggccatgagttaagtcattttcatagttatgctaaatcagcttccctcaggagcacccccttcctttcctttctctgtttaaatgaggtggagtatgatgtgactattccagcacactcaaaattagatgtgtgatcaagtattgatcttcaggaagttcctaatcctgtctgatgttttctgtgttagctttttttttccttctgtcataatgttagattagccagcaccttcattttgttattcccttactttttaaggcaggattcttctgtacaagaaccctgaagcgaccctaatattgtatccaaaatgtagggtcagaatcaggagtggagactgtgagttcattgtgagttaacagtctattatttaaaagtgcaacaagaaaaatagttttgctttcattccatttctgggactctaattttttccaagggagtctggcataaagtatcgtattggtccaattgcttgggatccactgagattgttactagagagggctttggtgtaaaaccccagagtaaaattctttaatgtccttttgggtcattgaacactttctaccattatgcttgacatggacaccattgaaatcattccaaggtcaaggtcactcagcaattttactaatgcttcaagttagtggaattttatttttccccccataatgcttgttttacaaaataaaatacagtatattttagtagatattgtaagatcaatttttgaaatttcttttatcaaaataaatataaattttatgaagtatctgtatgtttattatatgtaaacgtgcaattacaaatatgaaatataatttatatacatgtatctatgcatgcacctggatcttatttgaggtataaaacatgaaactagaactaatgtgttttacaaatatacgtaaaaagttattatttttttaattttatagaaacacagagtaagtaatgataaaaattcatttgtattaaaaatatttttataactacaattagtactaacattttgctttagcctaagcttaaatgctttatttgctagagtcacttgttaaaatactaaaaattttacaaggtatgaaggtaaaatagaaattatttcaaaaaaacaaaaatgcatgctgaattttctcttttcctttataaaacaagcaagtcctttatgtagatttctacaattcataattcaatgtcattaaatggcattcaatttatattttagactattatgatttcaatttgagacacaattgttttccaaatgaattcaatgtggggtatatttatgtaatagatgaaatgtatttcatctattttggaattgaataaattcaatttattcaattgtttggaattgaataaatacagtacgtataaagggaggatgaaaatgtacaactattggatgttgatagaagcattctgaataagaagcatttttacaataaactcaagtatatttttataatgtactttttaataatacactgattttaaaagtcttttttataatgtactttcatatattttttcttgagaaatcttgatcttgtattgacaattgcataaatatatttgtgcccagcacaatggcttacgcctgtaatcctagcactttgggaagctgaagagggagaattgcttagtccaggagttctagaccagcctgggcactgtggtgagaccctgtttctacaaaaaagtcttttaaaaattagctgggtgtgatggcacatgcttgtagtcccagctactcaggaggctgaggtgggagaattgctgaggattgtttgagttcaggaggtcaatgatgcagtgagctatgatcacgccactacactcaagccttacaacagagaaagaccttgtctcaaacaaaacaaaacaaaacaaaacaaaacaaaacaaaaataaataaatatcttggtatgtaagggcaatttggggttgataatttggagagggatggaaagatacatagatgcctatatctacatagatagagctctctctatacatacggatacagatataaatagatatctatatgcagatagatatatatctatgaaaatacacatctaaataaccatagatatctattaatatctatgtatctgtatctatctatacattttaacttaaaactttatatacacataagcctatagttctatatttgtagctaagtttaaaaagctattcaagggaagccctgagttgttcttttatggcatctggtggcatttcatatttgacgtgttggttgctattggtgtttgcactggtgaatccttccactggaaatttcatttcttcagggtttaccaatcacctaaaatgttttctttctggataatatcccctgactgctttcttcctcttttagcctaaagtttcctaaaaatttaaaatgcattgtagtcagctttacttacctttcacagaatagcaactcaagaagtgtatgctaagaggaggaataaaattatgtaaaaaatgaactagaaacatagttacctaagacaaaaataataagtggacaaaccaagagtaaacattttacttaagggtttaaaaatgatatcaatttttactagttagggacaatgaataatgcttatcacctccactgttatttagtgttgttctggatgatataacccatgtgtaatgacagaaaaaagaattatggctgttgaaaaggaatagatgaaatttccagaaaataagtttatacctaaaaaagccatcaaaacctattataaataacagaagtacaataagatggttagctataaataaatacataaaaataaatattttttccataattcagcaataacaaatctgaaaatgatctgattcttaatatcaattaaatatataataagtactatagcttaacaagaaatgtgcaggatctatttaaggaaaagagaaaagaagaacttataataatcattttaatacaaaagagtgaattagttgataggtagctaaaagcagaattttaaaaatttactaaaaaaagcaattttgtaagtaaatttgtaagtaagaaagaaaactggaatatatccctatctcactttacatgtcaaaataaattacaaattttatatttaatactttattttttccagaaaattaaatataaaaatacagaaaatgaacagaaaaaatataagtaagttacaaattctgggctaggaagcccaattataaaaagcaaaggaagacgccattattgaaaacatttagattttaaaacaaaaataaaccccctttttacatttaaaaataacatttaaaagtcaattgttaaaaaaaagtaaatgactttaacaagtgacagacaaagaaaccatacccttaatgtggaaaaaacgcttacagatcaataataaggatgcacaaatgacaaaaaagtatccaaatgaagaactacgatgaaagttcaaaatcactattcatcttgtaaatacaaattaaaactagaataagatttcattttaaatctatcgaatactagttggcgtctttcagaaatgccaggccaaactattcctgatgctagaaatgttttgcctgacagtggctgaaaactatttataacatatggaaaggaaattacacaacttgagaaatttcttgcagtgaactcagaaatgaaaaggcggttagatgacaatttcagttcattaatttataaattcacatgctaccacagattttagagatcatgcaattcagtatctccatttaagagtaggaatctatgggctattctgctcaggaaatcagcactatagcatgtatatgtatttcataaagtatctggtggatattactttcttgttttgtttttttttttttttttttatcatttggaggttgtaaagcatgatcagtccttataagggtcacatttagacagctacagattttaatcgttccaaggaaggaatgggggattatttcaaaagacgaaagaaaacattctttgatctaaaagcagaaccaccatttgacccagcaatcccattactgggtatatacccagaagaatataaatcattctaccctaaggacacatgctcgcgggtgttcattgcagcactatttacaatagcaaagacatagaatcaacctaaatgcccatcaatgacagactagataaagaaaatgtggtacatatacagcatgagataccatgcaaacatgaaaaaaaacaagatcatgtcttttgcaggaacatagagctggaggccattaccgttagcaaactaatgcaggaacagaaatctaaatactgcacattctcacttataagtgggagttaaataatgagaactcatgaacacaaaggaacaacagacactggggtctatctgagggtgaagggaggcagaagggagaggagcagaaaagataattattgggtattaggcttaattcttgtataatgaaatcatctgttcattgaacccccgtgacacaaattcatgtatgtaacaaaccttcacatgtaccccacaacctaaaataaaagtttttataaaacacatttctttgttttatacagaccagaatgaaatcatttctcaacacttcttttacattaaagcacattattcttgtttttttcctcaggtattgccctactttttaatcctaatctatagttccattgtaatttttagaatgctaatctaatatttattgaattcttttgtagtaagcaactgaaaaaaatttaattttcaaaaggaagaaaaaatacatgtttaaataataagataacacaactttggtattctaaggaatgtttggggattcattccagggcgctcatattttcaggttagctttcaactgttattttgtcgagtataatcaatggagattttgttattcatgtatttatagagctggttagccataaatagtttatgaatggagacatttctagcaccacctaatggcagtcaagtaaaaagaaaaagtttttctaatttaggaactgttttgcataatttaaattaaactatatagccagagttacttccatatgaaaatgaacttttacattccctaatgcactaactaggcatggaaatccatctctgagcaattggattgagtaggaatgaagctgaagggatatttgataatgaaaccaaggggtttctgctgtctttatgtgtgcaagaataagaaaatacctagctaatagaataaattaattttatgtgaaaattttctttttagtttcagaagcctatgcatactagattttccatactgtagtttcctgaaaaaagtatattttgagtattgtattggcatattttatttgtcttgtttttcagcagttatttatacatctttgaccaatttattctactagtttaataaagcgttttttaaagtttctgatagtttttttaaactgagtcatatcattctgattataatattggaattttctgttgaatatgagtcaaagaacatgctttagatccgtaagctctactcatttatttcatgtgtttcctagcaggatttgaagaatgtgttgtctgtcataaccctaggattgagatcaatggatttggttaatgtatccgaaggagaaggagaacttagcgatagcagcagattctgacacctttcatcctcgtctcaacactttggtttgatactttcttctatgatataaacagggaatactaggcagactgcagatacaggtagttttttgtttgtttatttgtttgtttgtttttgagatggagtctcactcagtcacccaggctagagtgcagtggcacgatctcggctcactgcaacctccaacctccgcctccaggattcaagtgtttaccttgccgcaacctcctgagtagctgggattacaagtgtgccaacgagcccaactaatttttgtatttttggtagagatggggtttcaccatgttggctaggctagtctcaaactcctgacctaaagtgatccgcttgccttgacctcccaaagtgctgggattacaggcgtgagccaccatgcccggccagatacaggtagttataaaaatcaacaagaaagagacagtctggtggtggtagtagtttcaagaaagtgctttctcttcgactgcaatttcttcctttctatgaacatttatttattgatgccctgtaatgcccttcacttctttgtgcacacactgaattttaattcagtcttcacagtcctgcttaaccatcacagcttctgtgaactttttctgtatatcattttgctctcatttcaacaaaattaatcacttttgctattttatagctgtagattacatatccctcttgtactgggtctttataatattttgtactcatttggatacaaatacttctactgctataggatgggtttcccttaaagtaagtattatgcctttcttgtttatctttattattcagagcaaacatgtattttggtgaaagcaaaggcaagttaatggaactgatgtatctttaagttattgtctactgtttattttctctagttttatgttttaatgtaggctgatgttttcatttcttcctttcattaatccatttctttattactgctaaaagttaactagtatttgttgttagttttttgttttcttttgttttagagacagggtctcactatgtcactatcttgcccaggctgtactcaaactccttggttcaagccatcctcctgccttggactcccaaatagctgagactataggcatatgacactgtgcctggctgggtttttgttttgttttgttttgttttgtttttgttatttttaacatcatatgatacttgattgacttttctaaacccgtggattaatatctgcttctaaagtaaaaaattgttaaccttgttattgaaagctagaaagagaaaatgtctggcttaaaggctatcctaaatttttgaaaaattcttatgagaatataatcatctatataaagggtacatttggaaaatacaggtatatctttaagaaagattcagaatttacaagaaaaaatattgaatatgaagatgattagacaattgaacaaatatgtagataaatacatcaatttttacaaaacatgaaatagcattaaaaagagaagaatttatcactgctatcacttatcactgttgcagaggtccgattaatgcagtaagaaataggagtttaaaagttggacataaattgatcagataattattattttctgataatatttcctgtaaaatccaagataatccactgaaaatatagaaccagttgaacaatctacaaattgactggagtcaagagaaatatatataaaacagttgcattcctgttctcacaaaattactcataaaataattagaaacttctgtttcaaattgggatgtagaacagtaagaaagaacttcgctttcatggtaacaacaagaaaaccagactaaagaaatatctttttctatgagtctgtcaaggagcaagcaatgcagaaaaccctggctgaattgaattttaggaagaaataagtgcttcataggtgatcagagtgctgtggcagcttccatatctgaggctaaacacttgttcagacagcggaggagtatgctattgtagatggggagaatttttaaggtcaaggggaaaccatccacccttagacaacaatgtagcctagtaagatgaaattagatctaaaagtctaaatgccaaagcaagtagctcagccccaggttacactattatcctccacacttgaattttgctaagataaagtcagttgaagaggccctagaagtggattcctatgaaattttgccatgattggattccagaattatgaataaatttaatccaaatatgagccaaaaatatttatagtcccagccaagtcccccgctagctcaaatgaggataagatccaaaaggtggcatcaccaatggttgaaggttgagctaaacacaagtgaactaaatacaattaaagcccaacttcagttctacataagtcagtagaaatgtatccacagattgccaaattactgtaattagaaagcaaagaatttaaagcaaatattgtaaacatttaaaaaaaattaaaggtaaaattcatataatggatgaaaagataaaatattttaagagataaatgatagctctaagaagaaataaaatggaaattctagatctgaaaagtataaatttacaataaaaactttattggataagtataatagcaaattggtcagtgcagaataaaagattaatgaatttaaacacatatcattatgaagtaaccaaagaaaaatgaagagaaaaataggttaaaaaataaacagatcgataacatgtggaataatatcaggagatttaacatacatggagatgtgggttccaggaagaagaaataggcagaaaaatatttgaagaaataactgttgctaaatattcaaatttgatgatgaaacaacctaaaaatgcaagaagctcaatgaattccaagtagaataagtataatatagccacatattgtatactcacagtccgattactaaaaaaaaaagattatggaaataaaaaccttaaaatcagctagagaaaaggaaaaaggcactacatagaagaaaacaatgaaatgaatgaaggctaacatttcatcaaaaataattgaggctagaagataatacaatatctttagaaactttaaaacaccaatctcaattctatattcagtgaacgtattattcaaaaataatttgaaagacatttttagattaaagaaagagttagtatatcatgaatagtcttgcattacaagaagtgctaaaaaaagttttaggctaaaaataccaataataactcaagtgtgaggaaaaaatgaaggaaaatggaaattaaaaatgtgaataaacagaaaatattattaaaaactcttttgaagacatttgattagtgaaaacaagaaattttaaacatattctgcagtttacaacatatataaaattaaactgtataaaaaatagtacaaataattggacaatggtaaatggaagtatgttgctgtaaggatcttatatgtgaagtagtataatgttaatttgtgatagtatgtgtgttaagaatgcatatgatgatccttagagagccattttaaaaagtctaaagtctacctagggagatgaaaaaggtagcaaaatggaatgttaaggtaactcctctaatccataacaaggtagggaaggcacagcaaagaagcaaacagcaaatgcaaaaaaaaaaaagaagaagaaagtaagaaaagagagaattcaaatagcaagatggtaaaattaagttaaaaacatattaataattatgttgaatataaatgcacataacacaacaatcaaaaagaatagattattaaactggctaaataagcaagacttacaaagggtgtacaagaaacacacttcaagtataaaaacataaaaagcttaaaagtaaaaggatggaaaaaataaaccatgaaacatttatcataagaaaatggtagtggcaatatttatatcagccaaaattacctttaagaccagtaatattactaaacagacattttataatgatagtcaattgattaagaagaaattatcctaaatgtgcttatatgtagtaatagagtttcaaaatacataaagcagaagtttacaaaccaaaggacaaaatagacaaattcccttctatatttcaagatttttaaatgactttcttagtacttaataaaagaagttgataaaaatctataaaaatacagaaaaatcaaacacactatcaacaaacttcagtgacagttattgtacattctatacaaaactggaaaatagctattgtttttcaaatgtacatggaaagtatgtatatttgaaagtatgtacactacaaacattctacagctaatatgctgggccataaaagaatcttaatatatttaaaaagttgaagtcagaatatattctctgtttatatagaattaaattagaaatcagtctgaaaatgctatctggaaattttctaaatacttcaaattaaacaacacatttctaaatgccctaccaattaaggggaattttttaacaaaaaataaagtataacatgaactttttggaatgcaccccaagtaaggcctggagagaaatgtataggttaaatggttatcttagaagaaaaaagtccaagctttcctaagcttcttcttaaaacaggcaaaaaagaacaaattaagaccaaagtaataagaaatgaaaaaaattaaggcagaattggatatcaatgaaatggaaacagaaagcaaagcccagaattgatttgcaagaattatgggtgttggggaatggagagtggtaaggggagagaaggaggggggagagagaaaaggagaggaagagagagaaaaaaatattttggattaattttaaaaatctatcgatatgatttaccacattaatagaggaaatagtatagcaaaatatcatattatctcaatacagctgaaagacatttcacaaaattttatacctattcataatgaaaactttcagcaaactaagaataggagagatgaaggaccactacaaatattctacagaatacatatacatatatatatatatagtatacatatatgaaatgtacactacaaatattctacagctaatatgctgggccgtaaaacaggcaaaatatatatacaatatatatttaatatatatttattatatatacttatacatacttaatatacttatatatttatatatataaatatataaaagtgaaatagtgcatgttttgattttaagatagggatcaagttttcgttcaaactttaccagtagttctagccactgctaaaacaatacgataatataaaagtcataaatatagaaaaggaaaagaaaatgtatttgtcatcgacataattttgtatgtaaatgctttaaaaaatctttgaaaaagtgttaaaactaataaatgaacttggaaagattgcagaatacaatgttaatataaacaaaattaattgaacatactagcaataaacaatttaaacaaagttggatttaaaagaatattcaaaacatagcacttaaatttaacaaaataaatgaaaatatttgtatagccaaagctataaaacataacttagaaaaatcaatgtaaacctaaatagatgaagatttatcatgtttgtggatgaaaaacaaaatattgttaaaatagccattttcctgaagtcaatttattcatttaatgtaattccaatcaaaattccagcaagcttttttgaagaaattcccaagttgattctacaagttgaaagacctagaatatccaaaatactattgaataaagtattaaaaaaatggcaaactgagccatcttatttcaagatttaaaataaagccataataattaagacttcatagtatttgtactggcaaattaatcagaaatagactcagacttccaatgtcaattaaaatttgatagaggtaaggcagttcaatggggcgagtacaatcttttcaacaaatagtactgtatagtgtataggagtcaaaaaaaaacaataaagcttgacccctatctcacatcatgcatacaatttaatttgagatgggttcatagacctaataaataaaagctgaaattataaagcttctagaagataaatgagaaaatatcttgatcatcttggtgttggtaaagatttctcagacaaggtacaaacaaagcgctaaccattaaaaaatggtaaattcaacttcatctaaaatattaagaaaatgattgccattctaactgatgtgagatggtatctcattatggttttgatttgcatttctctgatggccagtgatgaagagcattttttcatgtgtctgttggctgcataaatgtcttcttttgagaagtatgtgttcatatccttcgcccactttttgatggggttgtttgtttctttcttgtaaatttgtttgattctggatattagccctttgtcagatgagtagattgcaaaaaatttctcccattctgtaggttgcctgttcactctgatggtagtttcttttgctgtgcagaagctctttagtttaattagatcccatttgtcaattttggcttttgttgccattgctttttgtgttttagacatgaagtccttgcccatgcctatgtcctgaatggtattgcctaggttttcttctagggtttttatgcttttaggtctaacatttaagtctttaatccatcttgaattaatttttgtataaggtgtaaggaagggatccagtttcagctttctacatatggctagccagttttcccagcaccatttatttaatagtgaatcctttccccatttcttattttcgtcaggtttgtcaaagatcagatggttgtacatatgtggcattatttctgaaggctctgttctgttccattggtctatgtccaacaatgacagactggattaagaaaatgtggtgcatatacaccatgaaatactatgcagccataaaaaatgatgagttcatgtcctttgtagggacatggatgaagctggaaaccatcattctcagcaaactatcgcaaggacaaaaaaccaaacaccgcatgttctcactcataggtgggaattgaacaatgagaacacatggacacaggaaggggaacatcacacaccagggcctgttgtggggtggggggaggagggagggaaagcatttggagatatacctaatgtaaatgatgagttaatgggtgcagcacaccaacatgacacatatatgcatatgtaacaaacctgcacgttgtgcacatgtaccctaaaacttaaagtataaaaaaaaagaatcaaaactttaaattaaaaaaaaaatgaaaaggtaagtcaaagactggattcggctaggtatatgtttaacttagagaatgccaagcagttttccaaaatgattgtttaattttgcctttacattagcatgtatgagagtttccattgcatcacctattcagcagattttggtgtttttaatttgaccaattctagtgagtatggagatgtgtctcattgtagttttaatttgcagttcctggatgaatgatgacactgaacatctttctcatgagcaaatatggttatttgcatatcagaatttttagtcaagtgattgtttagacgttttgctcattttctattgggttgcttggctttttattgagttgtaggatttttttatgtattctacatgtccattgtaagaatttaaatttctgataaaagattaaaaaaatctatagtaactttttagcagctttttcattcatactagggacttgtattacaggttccttctcttgatttggattttggaaggcaaaattttcatcagctgaaatgtattagttcttgatttctttttgttcttacaatagctttgtatggctattacttgacaatttccaatcattttgaaatgtcttacattttcctgtatctgcaataacaaagttaagttgacagggataaaggcttttggatggctttttatgtttcttagttcaagagagacacatttggtttttgaaaaatgtttgtgttgaagtctaacatacatacagaaaagtgcaaaaagtagcagtgtgcaggttgacccatttttataacccggatagccttgtgtacccagcacccacagtacaaaatagaacactactgggcccccagtgggcctgccttgtgccctttctaaatcccagccaggattacctctatccagacttctaacatcatacgtggatttttgtctagttttgaacttgatataaatgggatcatacagtatatattcctgtgtacttagtatctcttacacaatccatgtttgtgagattcatgtatatagttgttcattctcattgctatatctgttgtttgtacagttgagtgacacgtgtgtatgtttcagtttgaaggtgtaatgaaaggtcttgctgtaaacatacttgtatatcttgtgaccctatgcatttgggtggggctggatgtagatccaggagtagaacggctggatgaaaacatacatatatcaaaagatacaagggtaacttttttgtttgtttttgagacggaatctcgttctgtcgcccaggctggagtgcagtggcgcgatctccactcactgcaagctccgcctttcgggttcacaccattctcctggctcagcctcccgagtagctgggactacaggcgcccgccacgacgcccggctaatttttttgtacttttagtagagacgaggtttcgccgtgttatccaggatggtctcggtctcctgacctcgtgatccgcctgcctcggcctcccaaagtgctgggattacaggcgtgagccactgtgcccggcccacaagtataacttaataaatactgtcagtttttaaaagaggttgtacgctccaactagtagtttatgaatgttgcatgtatagatattattacattatatattataaatttaacattttactttttaatttaatattatatataaaaatatatgtaatatatacgtgtgtgtatgtgtacatacacacatatacagtagttgcacatatttggctacactttgtgtttccttttcattttagccattctaatggatatttagtggtattgcatttcattttgcatttctcagatgactaatgataccgaccatctttttcatattttttttttctggctatgtatcttggtatcagatatatgtattgcaaatatctgctttcactatgtcatttgtcttttcattctcttattcataccttttgatagccaaaagttgttaattctaacatggtctaatttatcaacttttccctttatgttatagcttcacatttatcgtttaagaattctttgcctaatccatggccccgaacgtgtatgatttttatgattaaattttaaagttgtaaacctcttacttgaaagttaaatatttccatgtagaacttggatttttcatatttttagaatgttaggccatggatgtaagtttattttacacatctcatgtataccatttgtacaaagtatgtgttccttaaatatttcctgaatgaatgaatatagagatgcatgaaatgctctattgtttaaacactagaaaccaaaacactgaactttagaacatttcctgtctcattttttgaaaatcaaagtctaaatttcagaaagtgagaaaagtataattttcacttgtctgcccattttagtcagtgtttcagcttaacacaaacattaaaagcaaaaatattttggcactgctgggctctgatccacagctcttcttattcctgggcccaggatgataacacattcatgaggcagaggggaagacaagttcaactacacagctgtattaaaatttctgctctcctgcgcacaccgcatgtccactttcatttctttggccaacacaagtcacatcactaagcctaagtcaatagttgggaatctgtaaatacataatcttcttataggaaaagagagtgttaataattttgaatagttatgcatgttaccattctgtctcacggtagagtcagtaatgttttctttaaaatgttttatatgttaatcaaaatattatgtttatatttaaatgtattcttttttatttagttcatttaaagaattgattacatgatttcagcatttggctcaaaagatagaatttatctatatctatggcaataattaattgtcaagaatatgtttcagtgaacgtgtgcatttttaattttgtcatagattttgcacaaaagacattcattatttattttggcagtgtaaagagaaaaatgagaagattaaattatttggaaaatgctgtgggaaagtctcacatacaccatcaattccaattgcctttttttatactatagcttcccttcttaagaaattttccttgatctgtgtaaaatattatattttagttgcactagcagtgcattttctcatataagcataaaacttgaaaattaaataatatattttagaaaaacacacgaacttgcatatttcttaaatagtgcataatttttatgagattcccacgtatatcttgtctaaatattcctgtaattcttactgatttattttcattcatcagatttctcttgaattaaagacaagtagttgtcttcccagattgagcaattattgatatcttccaacacccaattccttgtttttattctcctctctactgccacatagatgactccaacacactggtagagagttttgctctcttcatgttccaaattatagcatttttgtgaaataacctcaagctgagtaattttataggaataggttttattataatatatgataccaaatatcacataaaaagtggtgacagaaagataagatttctcaagtagtgttactctgaaccataaggagagaagcttaagagaagaaaagagttggtagaaatataattgttctctgctcaggttgtagaccagactctacgtctatgtttctgctggtagatgcttccttttatctccctggtctaccctgataattaatttatatgtctcccatttctttctctatcagatttttctaattcgtgttctgtacccaccttctactcattcatttcctcagtccttatcacccagcagtcaagagtctgtccattctacttaactgaaaaagattatgtcattaccagctccgtaagtttttcttcagttctaattattctggacctattggaagtgtttacacagttaactaaccttgcctccttaaagttccctcctatctagatttccattttacaatattatcttgatctaactttattcttgcccttgtttttttcttttctgaaatgtggacatttccattaaaggctcttgttctttttctacaatctgtctcttagacatggcttttgataggtgattgccaatgtattttcctagcatcgtcttctcttctaagatttagtttctcatttccaaatggcaggcagagttttctgcatcataagttcagtatgcctaaaactaaagataattcctaaccccagatttccttccttatctgacatttctatttctgttattaatgccccattttcctcaataattggtgaaaagaatggaccattttgccccacaccatcacctcatatcaatatgtcttaatgtgcctttcctggtatgtatagagtttatcctttcaattactaattcagttacttgtctgtccttgtcttattctcccaaagcacagcactcacctcttttctgtgtagctaagttacgtctcctccctacatttcatcatgaattttgttgccttagtctcaattttgaaaatcctattcctgctctccactcaaattttaatttcttccattaatttatgggatatgtttcaaatgggtggctcaatcatttcagtgcacttaataggggagatgagagagaacaatacatctagtagcaggagtccaagtgtgtttgactactgaaaagcaatttgttggggcaaacaattctattctgtggagtggaagagttgccaggaaggactgcatcctgaatctgacagcaagaacacaacattcaagcaggccagagtaagagaagaagagagtgtgtaacaatgagaaataaaaatcactaggacaagtttgttgaaaatgaccaagagcataaaacgtagaagatggagatgcagaagtcaagaaggccaggataaatttgatttgccttcttggaaagtctaaagcttgtatcctaaacttaacctttgctgtgactaaaggaatagcactctaaaaatgacttagaacacagcattctttttcatctttgtcttctatacaaacttctcaagccagattgtacagatgtggtctcacctatttctccagatttatctaactgtctccctcacaaccagccttcctcaaactttccatacctctaggactttgtacaattcccgccaaatccttcatattctctaaaaacaagctgaagtactatattatctaaaactgtcctcaatttcttttaatcaggtattttgtatacatccctataccatttatcacattgcattacatttttttaattgtcttttttctcaactagaactcaatgtcagttatgggcttattagtttttcttctttgctgtgtatcggagtactattcaacaaatgttagtgttccatagatgtatgttgaaaaaacgacagtccaatgttcaccaaatgatatctgctttcctgccttcaaatcctagctaaagtttttctcttcagacatggcttctggagtagttgctgtctattgaaactgagttaaccaccacccacctatgtagggcttttggttaccagcccagcctgaaggaagatctccttcctttaaatttttattatcctgcctgactgtatttttactcaaatcagtattcattcattattcactattgtgttcttgagatgttatttgattttcatatatggtcttgagctcttatttgattccacaggataatttgttaagacatatacatttaatattttcaactaaactggaaattccttgaaaacagagattgtgtctcttaccagttttaatgcattaagcaaaaagccttatacagggcaagagctccacagtatgtgttgagtacgtgggatactgagtagagtggagatggggccatgtaatggtaggactggagatggggccatgtaatggtagggggaaggcatcattcataggactggagatggggccatgtaacggtagggggaaggcatcattcataggactggagatggggccatgtaatggtagggcgaaggcatcattcatagggctggagatggggacatgtaaaggtaggggggaggcatcattcataggactggagatggggccatgtaatggtaggggggtgacatcattcatagggctggagatggggacatgtaatggtagggagaaggcatcattcatagggctgttgcatattgcccctgcttcctaagctgtggaaatttctatgagaaaagagcattgtatatcctatgatatgcagggctagtatgtgctctgaagggtcagtaaagatcccaaaattctgaaggctgcaaaccatttggttatagggtggtgtttcaggaaattacctctataggcctcttcatggcaggtctttccaatattaacttctattactgaaccgattctttaaacttcataaatattttaagcaagaccctctgtgtttctttcactcttgtcaaaaacccatttatttttatgactctctgataatgttttcacattgatactctgagtatccaattttgggttgacaatatgtctttttgggttgatgagttttgcataaatttaaacttcattatatattgattagcaggaatgtgggcataagattccaagtactgaatggcatttaaaatgggatatatttaaaaccaaatggcctagaccatgcgagtatattgctgtgtataatttcctgactgtactcactacatcataaataataatgaaagtaaatgtacatttatcagaaagaatcaacaaaaccccagcactgatttgctgatcacacttgtcttaccaggcattaaggccagctttcgaacaaaagtgcctgaaggtttgattgtctttgcagcatcacctggcaatcaggaagagtattttgcacttcagttgaagaagggacgtctttattttctttttgatcctcaggtaaatgagaaatcataaactttaatatttttaagaatttagtaggtgcctggtactgaggtaaatgcttctgttttcacactgaatcttcattcaaaccttgtaaggtaagtactattattatccccattttgccaatcaagaaaatgaaacttacaaaagtaatgtgacttgccctcagctaaaatagcggagctaacttttaaaccatcatggtctgactgagaatctgtgggcttaacaaccaaaatgccaccttataatgaagattaaaacttttaaataaatttaaagagatctatttttatttttcttagtagcaaaaaatcatgtccccttttcttccttccctgtctttcttttttcattgtttcaccagcaaatatttaagtggctatcgggtactatggtactgggcgttgcagactaccatagtttcaaagttaaatatgaccatgcccctgcaaaggatacagtaaaataatcaatttaaaattcttataaattgtatcaaaataaagatttaggattctatgtattataggaacataaaataaagaaataaattgttttctgagttgtcaattttctctggaaatgtgatatttaactgagatacaaatcaatgaagaaaagttggtcaggacaagattatatgtctgtatttgagggtgtatatttcaggtggggcagtacaggggagattctgatctccacctgggaaggtgctgagcataaagtttccaggcaaagtgagcagcaaatattaaggaaatagcaaatattaagtgcctgaggtggacgagaacatggcacattcagtacactgagatgaatctcttatggctgggaacagagacaaagggaaaggtggtagattgaaaagctgggtagaaaccaagtcatttaagaccttgtaagcaaatgtgaggatatgaatttttcctaagggcagtgagaaagcactgaacagttgtcttcacttgagttgaacaaatatcagtgagcatttgatattaggtattgtattaagcatgtgagatgagtaagagaaatgagtaagactaagtaaaatatattagctttccattttctcagttcttcaacttaaaactgatgatctaaatcacacgttatgcttgacaaataaatgttttacattttattggtaaagcagacacaacgttcaccctctgtatccaagttgcgtctaggatcatggactgagtgatctgactgaggatctcagcctcatgaaccctggagatccattgaccttagagagaaaaggcagggcctattgtaccaagtgtatctgaggaccctgccagactcaaaaagcaggccaaagtcctcctgctttatgaagctgggagagccgcacagtggccactcgaaggaccagggacagaaaggctccctcctcatgacttgacagggctctgctaactccctggctggtgcacagcaggtcctcagacacaaagatttctgagcgtcccctagtaatgcagcttcttaaaggatgccagcaggtgggcagtgagtaagcaaaaggaaatagcatcacacctaagcagatcctgcagccagagggaaaggaagaagcagcagctatcgcagaaggcaagacagatggcaactgaaaaaaatttttaaaaaatcagctgaagttgattcaattacataatggaagatattattttttatttgaaaactttaagtagattaattagaggagagacactgagcctcagattagtaggtcagaagattaagttgaagaaatctctcaaaatacataaaaatgtgacaaaaacaagaaagttagatactactactgtcactaagaagcgaatcggaaggagaacaaaaagcacatgctcaagaaaaagagggataacataaaatgatgaaacaaaaaataggagagaatatctgatttaagagggaatttagtataaatccattgaaaagactcatcaatttcctgtcaagattaagcaaaactaatacttctatgagacctctttgtgccaggcattattctaagtggtctctctatacatcagtttgtacacttacatacacacatatgcctatacacacacacacacacacacacacctacacacgcacataaactcatttgaacttttcaacaactctgtgaggtagatactcttcatattcccattttacaggtgaggaatctgggccacaggtaagttaattttccccaagtcacaacactaataagtgaccaagccaggttataaacacaagcaattgagctccaaagaccatgattttagctacagtgctatactgcttttcaacatgaaagaaagatggttgttgatatccataaattcagaaaaaaaaaatccatctctgcaccaggttggaaagaaatatttcagtaagtaatctagccaaaaggaaaaataacagagtcagaaatataaaaagaagaagcatcagtgaataataaatctagtaatattaagttatgcctaaatatttaatgatagagtgactagaactctgttttacagtgccaaatgagaatctttgaaatagaagagaagtatagcaaaggcaagaaaaaaaacgtgaataatcatttgttgctaaaattagtaagatttgaaggagaggaaagatgagtgaattaaaagttctgaagataccagcttagtggcggggtgtgggtggaataagggaatagattatactgacgttttgttttcgttaaataaatagggcaaatgtttgatttcaaatgttatagaaaaataagttactactaataaaaagtgctcttcaggacatccaaattaacaaggttaaaaaggacagcaaatgctaagttaaaaaatcaacaaaaatcagaaaaagaaaggggagagtacagtaaaatagaagactgtcaatgagaaagaaaaatctggctctgctttttccccttcaacctgttagtatctggagatatttaagaagaagccagatggaaaaaaaactaatcacaggaccacttgtttatagagctttaaagtatacaaagtgagttcctgttaatgatctcatttcattcttgaagtagccccttgaggttgattttgttttcatccctgctttagatgaagtggcttaactacggtcatagagtggtttagggatagaactagcactgaattcaattatttgaatagcactgaattattttattcaatgaaactttgctaagaatttattggacttcacagttatgcactgggaacacagaaatgaacagaatgacactcattggaattctggccattggttgttcatcacagattttgagtatttatagccacccccctaccaaacatgggacagtcattggagaattaatccaaaaatgatttccccaagtctgaagcatgactgccatctcttttgacatgtggtgttgctatttctaaaggatgcgataccttaagactctgtaggataggagggtaaaggggtcaaactgcttaacggagaatggctgccaggaaactcatctggcaggtctagttgttttcatatcctttacggtgatcacctggacaggctggtgcaaagcgtggtaacagaattcagggaaacattcacagggcatttgcccatcatttccgcccccttacccttctcattcacacaattgcttagagtactcgtcactgctattagttttcccagttgctctgtccctaccctgtatagccaaaccctaagctgtatacatagtccgcaggtgccagccaagtattaataaaattgttaaagccactgggcgtggtggctcatgcctgtaatcctagcactttgggaggctgaggcgggtggatcacaaggtcaggagttcaagaccagcctggctaagatggtgaaaccccgtttctactaaaaatacaaaacttagctgggcgtggtggcaggtgcctgtaatccccgctactcgggagactgaggcagagaattgcttgaacccgggaggcagaggttacagtgagccgagactgagccactgcactccaacctgggtgacagagtgagaccttgtctcaaaaaaaaaaaaattgttaaagccaagttgggggctaaagggagtgaggaaggtttaatgatgtctagtaagtaaatttttatctgaaataatctctctccataaggtaaaactgcttgagttttcaggaaagtgacaattattttttaaaatacaagatatgggttgagcaggatggccttaggatctagctgagaaaatgtaatcagatgcattacactatgtgctcacgggccatgaggctctctatatatgaaacaacgagcttatgctagcaaggactgtgtccttccttacttccaatgaatttatactctaaaacaggtactaaacatattttctaaatttataatgaaagccccactcatttttagacaaagaagtgttaaaactgagggatggtgaaaattttgaatactcttctcttatttgctctctttttccaaagtaatatcaatgcagcttcttgtatgaagttagagctactctgggttttaaaaagtatagaagtttatttcatatgccttctattggcattacatttatttatattttaaatactttgggtaccactttaagtcagtttttctcctttaatctttaaatgcggacgagattatctagtgaatactttttatactcatcacacaagtaattatgtacttagtgtgtctgtcttatcagactgtatgatccagtgagggcaaagtctatgaatcttttgcccacaggtacttcctcaggacttagaacagtctttggaacatagtagatgcccagtaaataaatgaccattgacatattacctggctgattgactcaataactgttggtaggatactactactcataactgaagaaaattatccatttttctggcttacaacgtctagctttgtaatgattacacagatattttgtgatgtttgttttatttttttttattttgaaaaaattagagaaaaagtcttgctgttttgctcaggttggtcccgaactcctggcctcaagcaatcctcccaccttggcctctcaaagtgctaggattacagacatgagacaccatgcccagccttgttcaaatttgtctgtttttcagataatttgatttttatcaggaaaaaacgagatgcttatttttaaattgtttttactgaattcattcaaaatagccaaattttgaattatgaagagaatttcaaggaattttaaagtagttatctagcacatatttataaaataacttgaagtcattgtgtactttgctctttttaaaatatcttaataaaattgagtattaaattccttacaaaacaatttaatacaacgtagaggctatagatataaaaatgtatttggtttgtcatccaactatccgaagcattctattgaataaatgtttagggaaagggagattcttcatagtacataaaattggaaatgtgtttgtatattacaaactgggcacttgccattgttaaaagatacaataaagaaaagttaactgcaacttttaattacagtttttattgttatctccaacaattttctataattttcccattcttcacttaattaaattcaattttgaatatacttgatcagataatattttagtgaccagtaatgatctatgtttatcccttaaatattctatgttcagtgacattaacaggaaattcacatcatattctgggcttacttggaaggaagctgtgaaaatgaaagctttaaaacaattctgaatagcatctattgaatgtgtctgatatgttccaaatagaaagaacaacatgcataatatgacaccagaagtcatcacagaattgttctttcaacattgatggggggaagtaatcttaaaatagtcttcaaaaaatgatattctaaattgctgtaagtataaagtgagtttgtcatgctgaggctgtaggtaatgtacttgaatttgtctccaataaacttgatttctgatgtagagaactattaatgcttcagattgttgccaaacaaaatatgaagaaccacttattcagacacctgatctttagaatgcagcatcgtttgtaacaattttaacgctaactaagtacactttgatgagacagcatttaataaaatgctcattaatttcatcattagcaagggtatgctaagaagtaagccagtttcttatgtcacgcccaattagcatcccatgctagtaatcccattagtattgttgaattcactaatggaaaaactaatgggcatgctaccagggcacattaattgggcacgacaccagttctggttttaattattaaactacgataatgaaatgtgtgtttgtaaaatattaaaatgttgaaatagggttgaagaaaataaaagggtgtgtagacaaaacagatataaggaaagtcaacctacaaaaatacgaagactagaacttgccagatggtcatgtttctagctgatggagttgtctgtaaaagttgggatattgtccatgtgagagacaacccactcatactcatgggaaattaaaagctttttttttttttttttttactttggtaacatgaaattctgtatgtcatacatgttgtcgagctctttatgaggcccgacaggaaccaattaaatgtgtagagtggacatgttgtatcactgaagccatttcagagaaagataaacagaaatcatactaaagatggtatgattaacattgtatgtttttcaatatacatcttcagcaccattacatcaaacaattatctattttctctttttgaaaaaaacagcatagcaaaattattagagtttggtgaaattttctggtaattaagtgttttggtaatattttacccaatctaatttttttaatttttaaagattttattagaatgagctttattcttgttaagtaaatcaactttattaagaagaaaattcattcccatttagaagttgtaatttcttttttatttttatttaatagtagtactagtagctgttggtgacaaagttgggatatctttcacttagtcttattcacttaacacagaaaatgttactataggtaaccaaggctactataacatactggaaaattgtttacttttctcgaaagtagtgagatggcaggtgtttcttctatttctctttctcagtttttttttttattcttacctcctatttgctaaactctgttcttaatatctgccatttcctatgtcttatcacttaggaacatgtttttaactattatatgattaccttagccagaactataattattggattttaactacaaagcattgtgtactacatttaactccacccttatgtttaatgtatcacaactggctagtttttaaggtgaatgtcattcccatttgttattgataattttgtgaagataagagtgacttgtctgacatctctctatcttcagaactcattttgagtggtattttatgagttttaaatttttctcttctttttcatatttatgccatgaaacttaaagtctaaaattttagaatagaaaattctttacccttctgatgaatagctatattcatcagaaaatgcaagtgactttgtaagaaattcttactgcaaaggtgagacctttacagatctgtacactgtggtgcacagggaagtattaatacatcacaggaaagccagaatgatgctagacatcagctttaattttgagttctgtttgaaatgtatgcatgcttgtatcaggatcataatcttgaaacttgtaaattggtttataacaaatatgtgtgtgtttatttgtagatatgcatgtataaacatttatttattcattcattcccttaaggggtcaccagtggaagtaactacaactaatgatcatggcaaacaatatagtgatggaaaatggcatgaaataattgctattaggcatcaggcttttggccaaatcactctggatgggatatatacaggtaagtactttttgatatgtataaatagccctgttgatatgttggtgttgccatacttttctgttgtttatattcctacattcttatttcaccataatttctactcaattccatatatattgctgttgaatttgcctttgggatgctcctaaaaggatgaagtctggcaaccagtttttcatccatgaaggtctttggtaaagaaaaaaataacaatgaagtcacctatgtcttttacagttctttacaattcgtgtggacctttagttatgttctgtcatcttacttttgacttccaaaaaacacatacagtagaggaaagcagtttttgtctgcatttggagatgaggaaaccaaggctgagaaaaaagtaaatattttttcctaacttacacagttgagaggaagcattcttgggacacacatcctgttttttcacatttaagtttagtttttgctccagcctaccctatctgccacatttatgtaattataacatgatcactgtacctgtataatgatgcaggcttttattaaattattcaggaaatatctaattttaatcagtacctattatgttccaggtattgttctaggtgctctggatacaaggagcaaagagaatactgtaaaacttacattttatgggaggaatggggcagcaaaatacagaataaataaatttaaacaaatatcaagtggtgataaattctgagaatgaaaaagccagatgagagggaaagttgtgtgtgtatgtgcgtgtgtgtgttaagaaaggtctctctgatgaggtgacatttgagcagagacctaaagggacaaaggggaaaccatgtaaatatccaggaagaggatgctttgggttgcgaggacagcaagtatcagggccctgaagtgagagcacactacatgtggcatgtcaaggaccaacaagaaggccagtgtgggaaagagggtgtaaaagagctaatgacatgacataaggtcacagaggccattagggatcagattatatgggaccttgtgggcttttactttgaaagaaggaaactgttgaaggattttgagggaagaatgacataatatgacggctttctttaaaaggatcacactagctgctctgttgagaataaattttaaggggaatgagggtgaaggcatggagatcagttaataggcttctgcaataactctgtaataattcagacaagaaatcatggagacctgaaccagggtgataattgaagatataataagaagtattcagattctggttatactgtgaatgtcaaattaacaggatttggtgatgagattgaggcagaataggggttggtaaactatcaccatgggctaaatctagctcatgcctgtttttataaagttttattggagcacaactacacccattcatttacgtattatctatggctgcttgagtctgaatagtctacaaagacactgtctggcctttgacagagtttactggcccttaatgtcgagcaagcctgtcaggtttgggtctcaggcaactggaagaatgtagctgccaaaaccagggagtgcatgactgtgggagaagcaggtttggggagagacattcaaagttcagttgagaacatgttaaggctgagatttctaagacacccaaggggagatatcaggcaggctgctcaagaaacaagtctagttctgaagtcagaacttccagcaaaggatggtattgaaagccaagggaacagatgtaagtagggctaattggagtggattgggctctggaaaaacaaacacaaataactttgcctcttctctcaaagaaggtgggcattagaaatatgaacagggatttccattgttatgccacacagtcagagacccaggttcccctggcctttggccctggcagttcgtactggaacccagcccactattcatccctctagagtacttagggggtgcctatgggtagagaaaggaagaggcctgagaggcaggcggtctggatcattccaacatcatgatgctgggatgttgaggaagagccagtgaagaaaagtaatgaacaggcaatgaggagagaggaaaaccaagagagtggtatcccaaaggctggtgaaggattttattatttgctgagctagtaaaactagagtatcctggtgaaggtgtatttctcatctcctcttctctaggttcctctgccatcctgaatggtagtactgttattggagataacacaggagtctttctgggagggctcccgcgaagttataccatcctcaggaaggatcctggtgagtttagtaaggtatattatatgttgtcatccaaacttagaatagaacctgtttacattattttaaagtaagaataagtattatgttctacctcatgctatattttctatattaatgtgccaaaaatttcctttaggtctcttttttttaaaggaaccatgtattccatatgacttgtatttatattgttagtactcggttcttgatatataaaaggaattcattaaaacttttgctgaaatgaattataataatttcagtcaaaggtatgttattttaggacctatgcatagttttttctaagattttaaattgaatgtgaaacaacacagaaatggaaaactatgagcttgatttatactctaaatagggtgaagaacattccctgaatactatgtgataggcactaaaccaatccctagatattcatagatgaataaaatgtggtctttatcacaatagaggtcacaggcgtataaacagacaattccagcctaatgccattagtgctataattgagctatagacaaagtgattctcatatttttagaacaagagcataagaacatattctaaaatgaaactaattaaaatgaacatgaatggaattaaccttagataggaaaaaaaatcacccttcaaacgcaatgctaatattctaggattgtttcccaagtcctcattaagaatcacagggtgcctcccaagtctctcccaggaagttaaaatataactacataaatattacaaataagctagaacccagataagtataatttgttcatgggttgcagtctcagggaatcatgatgaagatcaaaaggaatagaaagtgttcatcaaatttaggagaaggatatagttgaatcctcaaggctgattatagttacctcctcagaaatgtctctagattagagagggttttcattcaactacttgagactgacagagaagtccctctaaaacacacacacacacacacacacacacacacactcacgtacacagcctttgttttttgcccttctgggaaatagtatcttcaggtactaggagagaataccctgatactaagtacccttcctgtagaggacacatctccattatgaataaccaattttactttgtctatgtaaattggccttataaaactctcataaactcaaagctgaaaactaagctttgcccccataggaaaggaggtggctgtgtgaaattcgacctcagtgcaccttctcctcctcttgatttttttttcttgctttttctctaattctctcatttgcacattttctctctcaaccttctgttatcaccctattcactgtatttataaagccacctctacctggtctggagagttccacattcaagatcaacactatatacatttcccaaaatatgaagccaaattattgatttacttcagtaacagactggttcatagatgaggaatctaaactgtaaactatatattaaatagaaacactcccttccaatctaacttttaaaattatagtactttatttttgaggctagtggcagatgaattttctgtgttagttgaaaaggcaatattcttgctactgcaaaaccaaggtttctgcataaacatctgtttctgcagatatgatgggtttgaaccagcactaaacattataattgctatcatttactatagctgatggtgtggtgtttacatgaatcattaagaggcttgcagtaaataggtagtgagagctagtgcctatttctttgactttaatggcacataaaattaattgcttgaaaataatctttcaaaatatatatttcttgatatctataaactcctgcagagataatccaaaaaggttttgtgggctgtctcaaggatgtacattttatgaagaattacaatccgtcagctatttgggaacctctggattggcagagttctgaagaacaaatcaacgtgtataacagctgggagggatgtcccgcttcattaaatgagggagctcagttcctaggagcaggtaatgctctaaaaaagacatgagtgttcacttaaaatctatgttctatcctttgtataatttaatctctcctgtttgattaacttgacctcatatgaacctagtatcacagaaatacttagttattccaatggtgcacacaaatatattcttgacatctgaatatgcaatataaattataagactcataagtatacatccatgtatgatatctctggtaactcatgcagttcttgatttacatatgttagcatcaccaatgtccatttgcaaatcagttgtttggaaactagaatgcagttagagaggtgtacttagaatgcactcagaaagatgtttcaaagagttttgtttactaggttaatccacaaatgcctatttatctcattatatagaagaacaatgttcttagttaattctcggctaggtaatgggttaagtaggccattgagagagaactggagactagaaccaccatccctgccattgctcaaaaggctacaatgaaaggggaggtgtaagtgtctgtagcttacccctgacatgcatgcacattgagtctctgcctgatcagagcagagacttccacccaggggaaggggagagggatgatggtggcttggtgcacccggcttgttcatcaaataaaagcccatcactgcctcctatatttacagctaagttggttggttattaagttgcttaaactgccttcagcacaaaaaggcatatgatattaataatataatctacacattttttattctgttttcatcaaggtcattctgagtttcttttagtcaatgcaaactacttattgttaatatttatctgaaacagtaataatcttacatgatacagacaacacatgatttagagagcaaatttcttcctgttaaaaagtataatatatatcaaagtctttcttagtatatcaaggtctttctgtcacttctgtgcaattacaaaaggaatttcttaacattgatttgcatcttcttttgtgagatttactcagtggcagactgtgtcctagagtttcttagcacccttacaatgctggcaatattgtgttacacatgctaatatgtacatatttttatctttaaagggttcctggaacttcatccatatatgtttcatggtggaatgaactttgagatttcctttaagttcagaactgaccaattaaatggattgcttcttttcgtttataacaaagatggacctgattttcttgctgtatgtgaattaatttgattaaaattactttaaaatataggacccaactttaaaataaataaaccatgtgttggcattacacttaattggggtttctttacaaattcacatttgttcattttttttcccagtcatttttagttttgaagtcctgtgaaacattttgtattttattatcctagtaattttttaagatgacaattgtaacaattataattttaagaaaacagactagatataaggaattaagaaaattcaatttagtatcttaagatatgaaaaacactatttccctcattatcttttgatatgagttttgaaagcatatatattatatatttttcatatgacatatagataatcaagtataataatatagtgaacactcctggacctaccaccacgcctgataactgaatattatcatttttggtctatctataaagtctttcctatcttgtttccatctcctttcagatgtcataggtaatcagaattttgtatttgttattcacatgcatttttatagtttgaacacctaatgaatgcctacaaattcttgcttttgaaatttataaaattggttttatactctctctttagcactcaacattgtttctgagtcatttatgtgtccacataggtatacattttcttggctgtgtagtatttctcttctcttaccaatgatgtattggttgttcccatgttttgcttcaatgaataagactgctataaacatttttatacatttctctaaatacaatgggcaactgtaactgcttttccttgtctttaatcattagtttgataccactgttaaatacgttattaaaattttaattcttaaaagttgttttaaagaactagcatagaaacaggagaaaaatatgaacatcttacccttagattcttgatttctaggcaaatagacaaatacaagtcttggcttttaagagtctaagatacgttcatctttttttttttttttttaacattcctagcatacacaatgccaatattgctaagaagggaaatggaaatttatcccttcatagtatttattaaaatttctgcttttttaaatatttgtttgtcctcttgtgtattgttggcttctttctctgaaacgtaatgtctatgaatcttctctgaaatgtaatgtctatgaatcttcgctgaaacgtaatgtctatgaatctaaggaccttggttctcttctttatagttgtatcttcagtgcctaagccttagcaattatcatgttaatcaatattgttgaatgaatgaatgagtgaacatgtgaatgagctcatgctgtggtgaccttcactgagcatcgttgagtcatctacatgtgcatacactgtggaggatacaaagatgtttaccatttggctcctcctcttgaggaccatatgcctgagctggaggtctatatgccctactatgccatgcttccaccctccaccttcctctattcattgctttgttactgtattaaataatactgttaactttaagtaactcttactaaaaaaaaaaaattaaaaaattaaggctgggtgcagtggctcacccctataattccagcacttttagaggcctgggattataggagggtagcttgaggccagtagttcgagaccagcctgggcaatatagtgagaccctttttctatgaaaataaaaataaaaataaaaagttagccagacactgtagctagttccagctactcgggaagctgaggcaagaggattgctgaagactgggagtcgaaggctgcagtgacctgtgattgcacctctgcactccagcctgggcaagagagctctgtctcaaaacaaacaaaacaaaaaaaaatcaatacacttagataaatatatacggagtgcctattatgtgcttggctttcttttaacacttcccatgcaactgaaaggaagcagtctttcataaaacttaacattacggtctgccatatctgaggactgaggctgctcccagattacccctcaacaactctttctattatactgacttatttcaatatgcatggttatcccctggaacttgataaactcagaatgtttccattgctgaaaccttgaatctcaaaatataacctcatatccctctagctctctcagtctctctcattaagttcaccaacgcattgacaccattggctattagcccactttctagttaacttacttgctccttacctgagccactataatgtatttcttcaaccatatttctaccaataccctgatcttgtgtcttgtattgggcttcacaaaccttgatccatcagtccagccacctcgcttttcagttctagtagctagattgctaaacactataggaaaactaatacgggtatgagaacttgttttgagctctccaattcttttattaaacagtatctattgtttacaggattttctaatatattttagatgtagaaagtgaaagaaaaataatcttaggatctagaaacactataacctgaatgtcttcaggtagtctcacactctcctgataaaaacaagcatgcatattcaactttcagtctctctatcaacttgaccgtatttgagccaagccagatttcactctctaccgactcaggggaacaaatgaacaattaccatgcttacaaccaaagaaaatatgtctaccgtcatcctagattctatcccttcctctgtaagaacttgttctacagtctcccctctttgtatgttcaactgttccctctcaattggctcttttccctcaatatatggaatgattgaaatttattttccttagtgttttttcttttgtctgtgaagcctcctccactgtacttttccttaccttcatggtcaagtgcattgaaagtggttacttttgttattgccactttttcatctcacttcagtccctaaaatgactgtacattaggttcctgcccctaccacacctttctacaaaatcacttttctaaagtggtcaatgacccccacatttcctagcccaatgatttttatttcttatattttttgtcctttttctgtcattctgtttttttcttattcttccctactgattttccaaaatactagtttctcctgatttcattaagttctcttagcttctttaaggagatcattgtcacttaaaagaactattttctactacaagacccttaaaacattggtcttgctgaggacactaatcttttcccttttctctcagtctttttacactcactgaataatcttatttattttgtcatgtattttctcctttttgctgggccatccccaaactgtgtatctttatgtttgacttcctcaaaaagagtttcatctggatgttttataggcatttcaaactcaatatatttaaaatgaactcacccctcctccttgtcaacaacaacagtcagcatttctttcaaatgcttttcataacgtgatgatggcagaacaccctcctagttacccaaaaaagatgagatgtgttcttaatttctttttaattcatctaactcatttaccttttttaccaggtcctaatgagttgcttttacaaatacttctaagattgagtcttctctttcatcagcatcatcattatccttattttaatgactctcaatatgttttcacaattaaatggatttcctaatgcatttcctgaattctagtcgagattttgttttcaatgtgtacttcttatgtctggtaggctaagcttttagtgcaaggtaatactgggaagaatatgagttttggtttcagacagacaccaaacattctttccataccagaccctcctatcactgaaagtcctttaaaatctggcttctacatagctggcaagacactacctcacctcccacctccatatgtaccctttgtcttagctaagttggtgcctttctctgaacctgatgtcctcatgtcatgcatattagtccccctccttgggggaccctccatgaatcttatatagtttctaaaaccttgctttaaacctttcccaatttccagggagcaaaaagccttctctgttctctgctttcactttactcctttcttgtcttgattgttgtattgctcccacatgtttgcctctgctactagacagtatgactcttaggagcagtgtttaccttagagcagcaggtatatggcacattgtaagagactcgatatttattgaataagtggttagacaaatgaaaaattgcttacctgaggtccttcctgaagatgatgcttttatggaaaaattcataatttttatctggcatgatttaatttgttttactcgacacaattgatctcaagattttaaatatcatatggttactgatatggtttctaacaaagtaaaaatatattaggtaaaataattatcatgagacattttgaaggaaaacctatgaacttattttttactatgaaaatttgggtgaaatatgttcacattagaaaatggtacagtcatctaatagaatacacatagaagcaattatgttagttaaagatttagaataaaaccgaaatattgaatcaaaatatgtcttacatatttgaaattgagttcactagccagttaaaataagcttaatcaagcttgacatttcattttcttattgtcttgccatattttcccccaaattaaattgatatatgaagtagtattttctcattttctaaaaattcaaagagtcatagttcaaagtgttctgttctcttcagtcattcagtcacttatgcaggggtttaatcttctaactatgttgcagcaaaagtaaaccttaggtctacataacatcgcatcacatcctataatcattagtaggtatgaatttgtttgcatcaatacaacattcttcatgtcaactataagctagaaaagtgtttcctatgttcctaagcagaaacttagggtagagtgacacatttctatagagtgctttcagggaactgttttgcttttcttcaagaaattgactttctgctctctcccaaactgcccttctgcagcctttttatatacctactttcttttttaatataaaatacagatggagctgaaaagtggaatattgaccttccggttaaataccagtcttgcctttacacaagtggatctattgctggggctatcctattgtaatggaaagtggaataaagtcattattaaaaaggaaggctctttcatatcagcaagtgtgaatggactgatgaagcatgcatcggagtccggagaccagccactggtggtgaattcaccagtttatgtgggaggaatcccacaggaactgctgaactcttatcaacatttgtgtttggaacaaggtaagttccatctggaggaattcacaaatccatacagccctggtgctaacagtttttggtggttctgtgtttcaagagatagcaatagactcaggctaaaagcagcacccaacagcatctctttttctggagaaatttaaaccttaaaaactaatgaaaacactttttcaaagagttttgtgtgttacccttaacaatgtgccatcatttataatcagcatatttatttcaatatgtcctcagtaaatagtaattaatatacatattattattaatgtgacatataattatatatgtggtacataattatatatataaattactatttactgaataaatatcaaaataaatatgttgattataaataaggtaactgaggtgcttcccaaagatgatatttatatggaaaaattagtaatttatatatttatttaaatatgtaatgcaattatatgtgagatacataattatataagaaatatatgtgtgtacatacataattatatatataattatatatataatgcatataaatgtatttcctcatatgttggataatgatcattatctgtatttacagatgaaaaaataaattaagttggtatgcataactagtaaaaaatatcaatgcaattcattgccttttctttctttgacataaatgctaattgtctccatagtttttcagtagagctttcatgtggaaaaaaaatgtggggtgtatgtggttgacttccaaacatacttgtgaaaatctatatattgtagattattaataactataagagaaaggaaaagtgcattatttacaatttaggtgagaagttaactcatagacgtttgaatgtaatcagagaaataattaatttgaaaaggctaacaatatctgtgtatcatttcttgtggcagtcatggttctgagagcttacatgagaataggtgagtcaattattcataacaagtgtgttaggcattattatttatatcctcattacagatgaggaaactgaagagcagagaggaaggtaactttcccaaggtcacatggctagtaagcagatagcaagacactaagtctctcaggcagcctgttataaagtcaactctcctttttacagtcaatgctctcttttatgggcattggtcaatgctcctttgtaaagtggggaaagcatagtaacttccagcataggaccaagcaccctcccacgtgtgaaaaaggtcctttacgtatttcaaaatctacataccctgaatggttaaaattttcatgaggcaatctttgcctatttggtaagtacataaagatttaaatgcctttgaatagaaaatatatggcaagctcttaggagacttttagaagggtagtagtaaggagttaatgaataactggggtgtaagacagtaatgacattttcaaggcacttaagatgtaacagcagctaaaaatattacattcatataagagcttctccaggttttcaggtttctgaggttagaaagaacttgaaaacccttcgtatgagtgagattacttaatcctgtttgcttctgggaaaaaaaaaataaaaacaagaaacaaaaaccctgcatgtacagccttgttctttgaattacccctaaacccattactattgatggtcctaaagacgtggctaaaaccaaaattgtaagataataacagaagtttaaaacatcaccatagacccaaagggaataattttacctacacactatgactaagtctgtgatactggaagatattttattagtgagtaatattaaatttttattactgtagtatcatccatatcagtggtctcaaaacactgaaaaaatattgacgtatggtagctggaacgtagaagtcaaaattagccattatttttactattcaagatacattgacatcacctggaatggttattaaaaatacagatgttagggacccctgtcccctaagattctgactcagatgccttgagagacactgatctatataaatagctgcatgttttatacggtgatcagggagactagtcacaatacagaggtgcagcatgtatgtagtcaattgcaattaaaacaaatcatgttcatttaatgtatttctttcaacccactatcaattgtcttaaaaacgtttttccttttctctgcttcttaattagcaccttttttttttcatcagaagctctattttgtggtcatattagtgctattttttttttaatctactaacgttgcaatcttcctccgaaccagatacaagactaattttctttcttgttttgaaaatgctgggcaacataatttgctgaagatgtgccagctcagatgatgagagtttatcttcttagaatgatcaatgaggataatcacttacatctaggttgggcatgactgggtctggcatgtggtctcacaggcaatgctctgcccaaacccctccatggagagggagagagtgggggctcaaatttagcaggcctgccaagccaagcactctgcagcagtactgccttccctagaggaagggctaatgtttttctgattagtcatcttagagctctgggccgccttttaggcatttagaggcccaggggtggtggtgtggatggggatttttttggattctcacaagggtagtggagtaagaaaagaaagcatttccactcctctcgcaaacatcccctttctccttttgttgtcctcgcatctcattcaaatgttttaggtctggggagcatttctggtggtacagagttgaaagcacgggacaaccttaactgaactctttggttgccactggaaggaccctgcactagagctcagcagcttcaagagctcagcagtctccaaggccagaggccagaggaccatttccttaggaggattagtgcttacaaacttcattttataactaactctctaggcctttttcttcatctccaaaatgaagaaagatgtatctccctgggctttcccaaattgaaaatttcatcttgtgaattaatttttatgatgttttttgctaaatttttaattttttaaacattatggtaaaatatatgtaacatgaaatttaccattgtaaccatttttaaatgtacagtttagtggcattaggtacattcacattgttttgcagatatcaccaccatccctctgaagaactcttttcatcctgcaaagctaaaactatgtacccctcaaaaaataatgtagcatttcttataacagcacttgtttgccaagctgccctttcactgttctgattttgttggtagggaagttagggtacagagaattttgataatacagttatgtgccatcagaaaattactactgataaatacattaaaattcttagcttctgaattttccagccaatgatttcatattgagcttcattgctttcaattcaattcacccaacttattgagtgtctactgtgtgtttaagatagactagcagtattgatcagtcaggactaaaaaaatgtggataatagtaaaagacatttaaaaggaaataggctgcaacttaatgtgttagaaggcataataagacatcatatgaatgctgaggagaacaatatggtcattgttactattaacttattttactgttatgcatttcattatattttatttccatttcctgctgctgtgctttaatcttgaaaagagctgatcatgtgtttgaggcctttcaaactttacagtgttttgttcggagagagagagagagagagagagagaacatgcacgctacagcaatctcaaactcggtcctgtttgtcccaatttcgtgcagttttctgcgcagagtactgccagacttcactgagctgatctctgttttcacaaaatagcatgtaattcaaagccactgctattccctggctaactggatgccttttttgtttgctgtctaacaaaaaagtggtgaatactctaaattcatttcatccgcattctctgttaaacttcacagaatggtactgcgcagtgggtgttctaaggtcacctgtgcagaatgcacattccatgaaatctcatggtgttgctattgccaacagtgaaggctggcccctgtcatgctaatggggatgtaaaactggtgaccattttgtatgttcaagattatggaactctgtgaaaaatgatagagcatagtgacagctcttctgtaggctgatgtaactcgggctaaattctatacctctgaagtgatcattatgccattcatggcaatatttcaggactaatatattttgaaattatgttctctctcctggtattctacataaaatgctcagagtgtatttttccccaatgagcttactgaataatcatgctaattcaaatattattttttggcacttaaaactgacttatatagtaacttaatctttcagaattaagagacatggggctatccccctaccataatatgaagttgcctaaattttattttatgggaagaagcggaatttagaaaatgtgggcctaaggaggtaaaataaatgctttttcagtaccaaaagttaaattagaattatccattaatgtgttttccaaataacagaactatatttctttgcaacaaattagcttgttaaaaagtaggaggcataaaaggttttccaaggaagactcgaaagtctagcaattgtatctaaccaccccccttcctcaaaatgtagtgctgcagaggacaaaaatgattggtaattaatgactcaagccctttatgcgatactaatcccttactatttgctaggtttcggtggttgcatgaaggatgttaaatttacacggggtgctgtcgttaacttggcatctgtgtccagcggtgctgtcagagtcaatctggatggatgcctatcaactgacagtgctgttaactgcaggggaaatgactccatcctggtttaccagggaaaagagcagagtgtttacgagggtggtctccagccttttacaggtaatgtggaggtcctctaaattaaatgttacatgtctcttattcatccccctttccctccctgccagcccctcattaatctatatgagtattattttaatcttgctgcatcttatttccatttaagaatacctgtatcgagtgatagcctcgcatgaaggaggttcagtatatagtgattggagtcgaggacgtacaacaggagcaggtaaatacttatcttcaaatgcatatgtgcacacacacacatgcatgtatttgtgcatttatataaaaggaaggactattaccctgaagcagtaatatttttgtagtcttctgacagagcatgccttggtttgaaaatacatctgtcaatggctaaaatgcttagtagatcagtgcttttcatttaccaagaattcactaaatacttgctcagacttgatcctttcctcttaggatgcagaagtaaggaaagttcaggttgtcttaaggatgtaatagtcccacctacctaacatgtctaaggataggtaacctttacagatggtgtagatagcaagaagctgaagtcagggattaggattatccttggctgggagtggcaccttcttgactttctcacagaaagcacatttgaaacctgcaactggttggaatcaggggtgtctatgacatcattgcagatgtttgccccgttgttgactattagaatcttagaatgactctcccaagagagaaattgctgattggtttaatatattttgaattggaaaagaaccaactaggagacagtatacattagacctaatctcagacaactgacttgttttgtacttctgactggccacaaaatcttttcccaaaataccaccacaggaaggcattcagcacaaagagttttgtgaatcagtgacattctactattttgggtcaaatatttgtcaggaaactgaacacatctccagatgattgccacttatgtctcagcaaggaagtttattcagcgagtatcaatttgtctaaagacgtgtttccatcaaggtattctcttatacttaatcaacagtaggttactatcccaggcatcctttgaggaatcttcttaatctaaaatataattaaatactgagatgagcaactaagaataattttcaagactctctacctacatattttccagaagaggacaacttgacacttttccaggatgatttaaattatcacctatttataggcaagacaatgagctgaacgatctcttaaaattcttttcaacttcagagctaagagaaagctccaatataaaatactcacttgttactgacatgttctctgctcctatttcacactcttctactttattaacaaatataaagcccgctttgagtataattcagcaacattaataggcgtctggaaagcacattgcttacttagcttaatagtccccattttgagtactactgagaaagtacacaaatagagctctgaatttatagcaatgatctgaccacagccctatgccataaattcatatttacaatctgaccacaacactgagcagctacatgctcccaagggttggagaataattgcactatttaattatttttgagtcagttttgctctgtcccttatgagaagaccatctgttagactgtactgtactttgccctgtaccacatttccgaactaataaaatcagcgtcactcccattgtccctttccttgcaactcgatcttgtggcctgtgtgttttctataggtgtctgtagtgttttaactgctcagagagtggttctcccctttggtgtttcctcttatcttttatgttcactttgtttcccttaaagctgtcctactttattggtctggacagtaaagtcggagaggaggagatttgatgtggaaaaaccagagtgatcctccatcgacagggctcaggagtccatgagcagctagagcaggtctctcatccatcatcctgccacggagttccttgggctctttctttgtgtccccagtgcactcagctgtgatgaagtttttactgatcagaactgtagaaatgtctaataaatagttaaaggtaatagattttttaaattagggggctcagcttgtaagtaaggttttgcagttcttttaaacttcctcattttgtgatattattttgaaatattctgcagaacaagactttgaaaatgactttgtagaatctcaaaggcaccagctcctttaccccacccccacccccaaaaactgcaactaagaatatattccatatatcatatctggtagaactttgctttttaaaaattaattagaaaaacaattgcatttggaaaatgggtctaggcattcaagtacaacacaatcacatttgtgattttttttttggctaatacatcgaagatataaaagtgtcaaactactatgtataataacagtctaattatcttgcttcaaagggggtacatcattatattgcttgaacttgttatctgcctaccatccacctccttctttatgagtgatgtttaaacatgtctgatacattaaatgtttttggaaaacctggactagacttgaaagaatgttatgtcgatggagttttgatggttttgaaatatcgcttaaactgaatggctcaagatgtgcagtcatattaaatcaatgctgaaaagttacaactctaataaattgtatttatgctaatggttgagtctgatttactgcggccattaaaagtgaagaataggagcaatagtcttctcagaactgccattttccctattttctcttttattccttcacagctccacaaagtgtgccaactccctcaagagtccgcagcttaaatggatacagcattgaggtgacctgggatgaacctgttgtcagaggtgtaattgagaagtacattctgaaagcctatagtgaggacagcacccgtccaccccgcatgccctctgccagtgctgaatttgtcaatacaagcaacctcacaggtaaatgcaatcctttaacagagtagaccctattaacttcctttttgtttgcattttaaataaaaatcttctgcaaatgttttttagaaaaatgtattaaatatacatgtattttacctgattaaaaacaacacccatctaaagtagtggaagcctgcatctacctaggataaaaaggataattctacaatgcgcatgggctctcatggataattttattctaaggtagatattctctccatcccccaaagattacatcataggtggctatagccctttaacaccttatagacatcttttggaaatcctatgtataaatacttatttcacaaagcaaaaatttactctttgggactagccccagttcataccactattatttattgtaaaattgctgattaaacctaattatctcaaggtggaggagtcttagagccccagttagttggactggcaaatcagtgaatcgatttctcacagtgtggtgtgccatgaagaatgattataatgaaatatactcatacacaccactaacacatctcacactcaaattcatgcgtgtgtattaagagcatttttcagcttcatgaaatattaaagcacatttaaagggagagtttaatttaagcctttgataaaagggaagtaaatgtgtcaaatttgacagaaaaaaaacattttcctctatcaaaaaatcctataacgtgaaccatcagaatggacgttagaaaagccttaaatattttcccaacaaacctgttggtcaattccctcaagactttacttccttctttagacactttggaatgcacagcccaaatatactaccaacttttagcaaaagaaaaacaaattcacacccttcacttctttcctattttaccctccttatcaaagcccagcctgagtaagcccacagcttgccttttcacaggttgcatatggcagctacatgggctggaaaataccaagtagtttattgctaaaaatgctcaaccccactttcagatgagcactcagtaatgacaccaaccctactgtatttccagaatagctccttcccccattctcctcattaaatattttatatttttccaaactatacacgttacctccctttctcatcccactcagctgacagcgttctattttagattatattagacaccatagaaaaaacaatttattttataggatttctattactttcttactaccaaatgtacatattaattgcatttttctgcctgatggagttgttattaggggttggatgaatgaatgcatgctaaaacacataaaaccattttgatatacaggaggtgtgtgctatgctataattttattttcattattatttttaattttcacgctttttttcctttctgttttacaaagcttctcttatcctatcaaaaatagaaatcttcacaagtcctctggaccctgactctttctgtttcttcagagatattactgatagcttatcgtcctctcacttatatttttaacgcctctgtctgctgcagtagagtatggcccaaggaccagcattactagcttcacttgggaacttattactaatgcacattctcctgccctgcccaccccacacccgccaaatcagacactctgcagtgtggctcagcagtccttgttttaacaagcccccagatacatctgatgtatgccagcatttgagaaccactgactgggtggattcttcccagggtcattcaaactcttttatctcccattgttaaaaaccaacacactaacccaaaccaatcacaaaaatcttaattctgtccaaactcccagctattgctccctctctcctcctctcggccttcgtctagcatgaagtatctaagctcattttgtcctcacttaactggcttctgctcattactttcgtgacgagcaccaaaaactgccatgtttacataggcaaaaaacacttgacactctatgtcttcaccactcttcagcattctccacagtaactctttcatcatttctagaaatatttcttcacttctgtgacttttctgcttacctcctggttctccaggggccctgttctcagtgtcctttgctcacttcttctaaagtgtgacaaaatattgaagagtctcaggatttagaactgggccgtcttctctttctctttcatttttttctggcttgctccagaagccttattgactctcataacatcaaataccagatagatgctgctattgactcctaattgtacatcccacctagacatccaaatgcctgcatccaataggcgtttggacacaatgacatttccaactggatgtctctcaccttctacccataccaaacctcaactcttgcttctcctgcattctcatagatacctccagccacccagtcaatacaatttgagagttactctggacttttcacctccttcacacctcatatccacagttgtcattctatttttcaaaatatgtgttaaggtcatccatttctcctctaatctactggccagcccaaactactaccatctttttcctggacaactgcaatacttaccttcatctttttcatagccttttttttttttttctctccctggccgtgagtgtattctacagagcatccaacatcatgtccctctcctcaaaaactttctttcttttttttttaattatactttaagttctgggatacatgtgcagaatgtgcaggcttgttacataggtatacatgtgccagggtggcttgctgcccccatcaacccggcatctacattaggtatttctcctaatgctatctctcccctacacacaccctccaccgctcgacaggccccgatatgtgatgttcccctccctatgtccatgtgttctcattgttcaattcccacttatgagtgagaactcgcagtgtttggttttctgttcctgtgttagtttgctgagaatgatggcttctagcttcatccatgttcctgcacttcctctctcacaatcacactttgtctgggtctccccctacttccagggtttccaacaattaccgttgtaattaatataatttaaagaaatttgtatgtaaatccttaggagaattcctgacaatgatgatataataaatccctagcagtggaataactgcatcgaaggcttttaagacattgtatagtcttgaactttgaagtcagacattgatataaatctctgctatataccttccctgtggataagttccacatccttctggatcctaaagtcctaacctatgaaatgggagagtgatatttacctcagaagaatattgaaaatattaagtgatatgatattctagctctaaccctttttagctgtgtagcttggacaaatcaataaacctctgtttgctttaaaatccttctaggtaaataagaatgagatacaactacatgcctcccagggcagctgtggggattaaacgaattcatatgtatgtaaagcacatagcacagtgcttgacatgtggcatgcactgtatcaaagttacctacaggatatctgtaaagtgtgtaacattatgcttaatgcttggtaatttctcaagaaatggatagcaattattattattattattactattattatttaatgaagtctcactctgtcgcccaggctgtagtgcagtggcgcaatctctgctcactgcaagctccgcctcccaggtttacgccattctcttgcctcagcctccccagtagctgggactacagacctccacgcccgggtaattttttttgtatttttagtggagacagggtttcaccatgttagccaggatggtctcgatttcctgacctcgtgattcacccaccttggcctcccaaagtgctgggattacaggcgtgagccacagtgcccggccaggatagcaatttttacactgcccaaaaagctgtacaaattatgcttccaccagcaagcagaatgcaagattgtgcatttcattttatctagccaacaccaaggtttacacttgaaaaaaattgcaaatttaaaaggcaaaatatatcagaatattgttttagtttgtatttatgtgattactagagagattagttttttaatatttattgaccatttctacttcttttatgatgtgcctaggtaggtccattgttttttattttttattttattttatttttttattttttgagacagggtctcactctgtcacccaggttggagtgcagtggtgcaatctcagctcactgcaaactctgcctcctgagttcaagagattttcctgccttggcctcccaagtagctgggatttcaggtgtgcatcaccacgccagggtaacttttgtatttttagtagagatggagtttcaccatgttggccaggctggtctcgaactcctgacctcaggtgatccaccagccttggcctcccaaagttctgggattacaggcatgagccactgcacccagctgcattgctaatttttctattgaatgattcacattttctcattaaagtttttctctgcatatgaagaataatatacatgtttatctcatctaatgcaactcccccagttttgtcattttttaaaaaattttgatttgcatttttgtgtagagatttaaaaaatattttatgtagttaatataacacccttaaaatgttcaatattctatgtgtgattttttaaaaatatatattccccatttagggttgattattgtttatgttagatataccatattgataacatataatgcatattcctcaaaatagtaattctaaggttaggataagaacaaatcagaaactggatgcagggaggcttttcaaattaaatcagcctctcccaagattctgaaggataccttcttgaaggcgagatcccacagattgtaaaccaatgtagggcagtactggatgttactcaaaaggcatgtcatacatggtagtgatgtatagggagaagaaaatcagaaaactgttgagcaattgttatttatttttatatatcaaatttgtcacaaactaagggaagagttaactatgttaactatgcatgcagttttgtcaatttctctgagatttttttgtttgaattttttgagtttttattacttttacacttattatttatgttttaaccttcaaagtctcattgctttaggtacagtcatgcattgctaaaggatggatatgttctgagaaatgtgtcattaggagatttcatcaccttgcaatgtgcttacataaacctagatgacatagcctactccacacctaggctagatggtgtagcctattgttcctgggctgcaaacctgcacagcatgttactctattgaatagtgtagggaactataactcaatggtaagtatttgtgtatctaaacagatcaaaacacagaaaaggtatagtaaaaacactgcatggtaatcttatgggaccaccatcctatatgttgtctgttgttgaccaaaacattatgtagcacatgaccacatggcagcaacttggctaacatcctttaattcaacattgttttcttataagtttgatgagaaaattaaaaaaaaaaaaacaatccctagcaagggccactctctgcatggaattttcacattttccccatgtttttgtgggttttctctgggtactccagtttcctctcacatcccaaaggttttccccttacatgaattgagttgtctacgtgaccccagagtgagtgagtgcaggtgtgtatgagtatgccctgtgatggtatggtggcctgtccagggctgattcctaccttgagccctgagctgccaggatgggctccagccacccacaaccctaaagtggaataagcagattggaaaataaatgaatgagtaaatagaaatcattataaaataaaaattcataaagtctatgataatcatacagatgcacagcaataaacaattcagtatgacagggctcagcaagctgcccagtctgtgattgctggggtttgaacttcatgctggtaggcggtgctccttacaatgttcacttggaaagcatttattccttgatttatataccacaccactgtcactcactgattcaccaaaacttgagtaaatcattatttcgttttgattaatcttttgtaaatgcatgtatagcacacattcatttcaatgtttaatattagtagtctatagaaatttggtgatgttttgtgaccagaaatatgccataggatcttaattcttttttacatcaattagcctgtgggaaaattgggtttgttgtatatcatttcacttaaaagtgatagtttacaaaaaattccaatgacattaagtgaagacttctatatatctctgcagttttagttttatctttcacttgagattctctgtatttaagtacgggagtcactcattcatacttgtttttataattgatataattggtcttctctctgccatcatgttttatgctttccagttttattatttcttgttttttagtgattttttcactacatttcttgccaatgtgtactatgaattctttgattttttttctttcaaggagtttgcttctctcaatgctaaattgagtcatcaaggacataggtagaaggtaatcttaaagactaagaagaactccagtattgccaggtggacttttcattgtgaagactcaggataatgaggagggaatgtgaattgagagtcaccaaagccagcttggataattatcaaagtcagagaatttcccagtaaacaaaaggaatactaggaagtgagatggaaggagctgataaagcagagagccagaaagctggatttggtggagacgttaggggtgcagagattgttttgaggcagctgttttgccagttggttgagaaaccaaggtaccaaaagagagaaaaatcggtgaagcctatataaacagttttgctattgagcagttttgctactgatcttgaaaataacccttatttagcatttctgaggtgacttttgttgagattttaatatttaagttaattttggttgttagagtcatatttaaataaaataattctgacactgaatgtacaaggcaatttcgctttattagttagcgtagggttctttaccaattaagtttaaaaaatgctaatcagaaaatgtgctgttttatttcattaattttttgttgtataataagctcttttattcttcagatttgggtctttcttcagcttggaaaatttgccattgtgtttatgatcattacttctggtgagaaatagcaattttcaatattgtatatttcttcctaggttgtcttcctcattttagtagttcagaacacggcttgtagagtcaaatcaatctaaggtcaaattccgcctatgccactttttagctgtgtgatctcagacaaatttaaaaacatatccttacattggagtttcctcattcataaattggggatgaaaaccttatttatattatggaactgctataaagattaaaatgagttatgtaaaatattttgctcagaaacaggcacatagtgagtgttcaatgaattcatagttacctttataatctctgaattacagtttctgatttctgggttattgtcccataattgtttttatttccattttctgatttttgcactgttgattctgctctttgaaacttctaagatgatttttaattcttctagttcagtctttgatatgatctgcctttttcctcatctagcttgctttgatttctgcctgcctcttgaaattctcaatttttgtcttcatctcttgtttactgcttaccttctgtctcttacttagtggattccaagttattttagatctaattaatggcatgcaactcgtgatttttaaattttacaagtttcttgaattaaatcctccccagaatatgacaatcttccataatttgagggctatatccttatccttctttcaagttacaatttttccatcagctaaatgtcctcccccaaactcaactccatagtttagttggctcatctctaatataaccttctgactgggtgtttgcatgggaaaattaaactgttttcaaatcatcttactgggcatccagttgctgttaataaaagcctttgctaagatgatgacagggttagtggggtaagtttgcattagccgcgcagccaccctacagtttcagcttctttcttcccagtgtttggtagagtaggagtgctgagagcttgctggcattttgcttccagtttaagtttgggtttgcctaggactttccttctaacagtccattgtctctgcctggtctcgttttaggtatttataaaactttggtcgtttcactgggattcttacaaggtggtagttcaaaactatagctgtatactgagtcaactggggagctttaaaaaatatactgatggctgtgtgccccacatgcaaaatgtctgattaaattggcctggaatgtggcctggacatttgtacttttaaattatctcaggtaattctgctgtacagccagcacagggaaactctatttaaaggaggagtttgtcaccagtgatcacatttaaattttatccagatattcttataactttcatttccccactgaaactcaaaaatgttaggaaataaaaaactaaatgtatataaaaaataataagctattaaaagtaaatagaaaatactagcaaaggaatatcataagatgacaaaaattaagtgtaatagttattgggaagtgggattttatgttcagacttacaaaaagcagaaggtaaaagcaaagaaaattattaaaaatgaatatcaactaagataactgaagaaaacagaatagtgaagcagaatatttaccattcatgaatttgtctatcagaggattaaatgagataaatcccagttgcaatggagagtccaagggttaacaggcccgctcaggagcaaatgggcccctttgggccacagggtctagattctgtgccctcccaaggccaaggttcagagcaaggagttctttaaggttcattccctcagccagagcctcagggtagaaaacccttcagttatcactcctgtgtatctttagatttgttgaaagggctccaattaactctgggtagcttttgctgatttttcctgcagccctgttaacatgcaaagctgcagcccagagagacaggactggcgtttcccctcaaactgaggactgctcagaaactgacttcataatttgatttgaaattatttcaagaatgaatggattcaagacttcgcacatatacgaattattttttccgtaaggtgtttaaacatgtaaacttaattatcagcataattactacagcacctggcatcaagtgttacagatataattggtgtatacaaaatattttctcaattttattgttgcattacattgagctaaagtctaggggttatattgcttcttcaggtaaaatgataaataatagtaatatttcttactatttgctatagtttggcaaatgaatcaataatgataagaataatcttccagatgactcacatatatctacatttatgtaaagaaaaagacattttaatttataacacaaataataatatagcttttgccactaaaattgtttcagtctttacatacaatggacttaatttttttacctgaatgaagtgggtttcatactgaaaatctgcctctaatttttgcctcttttacatggctactgtaataattagtgactctcaattctactggtcataaggtgattctcagattacttataaaatgcagatttgggggtcactcacacatgattctgtacatctgggctagtatttagcaatttgcattttacctaatgctccaattgtatttttggaaggtttatgaaccacatattgaaagacactagtgtagaggagtggtcagcttagactggaatactttcacctgctaggcttgcaactatccctgctttattcctgcttctggttctgactgtgttagctttgctgccagaaaaatgccaaggcaagtgaagaaagagaggcagtgtcagtaggacccctgaaccccagtaggactcctgaacttctgaaaattcccagaagaaagaaagtaagaattggggatcttgataacatggattctgattcactaggtctgggaatatggtgttagattctgcatttccaaccagccccctcccactctgtcatgccccatatagaaaggcaaggagctcactatttatatgggaaatggaaaacaacaacaacaacaacaaagaaaaaacagtaaaataaaacaaaacccaattctcaattacaagatgccccttaggttcatataaaagtgagagcagtataattcaatgtaggaattatcattgcaatgtcttggtagagccttgcctgcatgcatttaagttacaaacattcaactacatattttggaaatgggtaagggatggaggaaaaagtaaaaaagcaaaaattaaacaaaacaaaaacctataaaaatagtgtcataggcaaaggatgctatccagtatggaaaatgtcaacatctgttagctggaaagaatgtttgaataattttagggtttcccagtcattgacaaagaagtgatactcattgtttgggtgtctacaaaaagaatgaagacttcagagccctgaagaatcattgatttctgaagagttagaggcatacacaaaaccaaatgtactatactttatgggccatataaagagttgtcaagggaactttaaatcacgttatttttgccttatgcctgattttggaacttaaactcagctatgcagagtatcatcagtaagattaaattaaattaaaatgctactctatatatgtatgtatatgtgtatgttatgtacgttcatatattatataaatatgctctctctctatatatgtattctctctatatatatgtaaccatacttacctgagaagtctgcagagaaatgactgtaattcaacgccgtgaaatttttttttctattcaactgaaagttcttactccatagttgctaaaactgcctatggtactctctgtgcacccatgctatttcttcaatagacaataagctcctggaggacaagtttcatgtttcatatttattttaagcctcgttcactaccttgctcaaggtaagtgattaatatacttatcttaaaagaatgaatgaaggaatctttcaattagcaaatgtagctttctgctactaaccccatagttaacctaatgttaatatttttttgtgctgagttggactgagtattgaactactagtccttactaaagtctcctcagtcttttatcaacagttctttaattttatagaagaatgcacagagctatcacaacttaaatgtatatttggaacttaatacacatttcccaatagaaaaaaaatatgttggtagggtaagactaataaataactaataaagactaattccaaaacttagacctcagaatagaacccaaccactacatatttgaaatgaaaaataatggaagccaatactgctgcaatgctgataattataaagaacagaaaatattcatttatttaaaaaagtgatctaccacgttccatgctagtgctaggccctatcattgtaacatgatttttataacactaaaatatagcccaagcactctctctgaagtataagattatgtagacaatgaaagttttatagggaaaacctaacagagatgggtttatcatttttaattcattatttcacttgagatactgagaacctaaaataatagcgatgaagtttttctctcactggtaataggtgtccacagtaagtcaatgcagaggcgggatgttcataggcgagacccacacacttcatctttttgctgtgtcatccttatggacaaggcttctacctcatagttcaagatgactgcttgagctcctgccatccagtctgattttcacccaacaggaagaaataatggttaaagaatactcacattcactttaaagacatattttagaagttgttcctccacctctggttatcttgcgtggccagaacttagtcacatggctgtacctagcttcagggaatgttgaaaaatgctgtctttattccaagtagccacttgcccaggtaaaaagtgtttttattttactgaggaaaaggagtataatacataataaggagcaattagtaatctttgccacaataggaaatcgtcagaagtaaataaaaagtaattctttttgttggtgttattaaagataaaagccagtttttatagtagaccataaattaatattccaatatttgtagtttattacgaacttttttttttaatttgagatggaatcttgctctgttgccgaggctggagtgcattggcaccatctcagctcactgcaacctgcgccgcccgggttcaagcaattctcctgtctcagcttcccaagtagctgggactacaggtgcatgccaacacatctgttttttgttttttgttttttttgtttttgtttttgttgttggtatttttagtagagatgggatttcactatattggtcaggctgatctcaaactcctgacctcaggtgatccacctgcttcagcctcccaaagtgctggcattacaggctacaaaatatttctttaaatgtaaatcttgaaagaaactggtctgaaaaaattcacaggacgaaaatatggcctatgacataaatagtaaaaatagaaatgatgtaatgttcctgcttagctaatgtagaaagatttcattaggtaatgcagtgttgatgagttaatagctttgtctaactctcctgaatacataatgtgcctgaactactggtacattgtgaaatcttcagagagagttgttttttaaaaaaaaaagtttttcattttattttatgcaataagaattgacaccaaaggatttgcatttctttttggtaacatgttgagccgtagttaaaaatgatgaaaatatataacttttgttctacagtgataatcaactaggcatgtccacaatgcttataaacattcaatacaaatacttcaaggttatcaatcatagttgataaagaagaagaatgcacagccagacttttctgttttctaccttttatgatcattttatatttgtgttatatttggaacaaattaaaagggttatatgtataataaacaaaggtccaatattgaacccaatctctctctctcacacacacacacacacacacaaatgcacacatagaatttcttataaatcagtcatttttgtaaaggaatattacaggcatacaaacttgctcattttggaggacaagacttctaatttctgtttgtaagcaataggtgtcagtaataaatttgaacctcttaacacattttaaggtgcattttaaataagatattttatagtaaaaagtgtgctattattgtttttaattaccatttttcaacacttttttcttgtttgtggaactggagcttaggtcaaatgggaggagtaatgatcttggggtcagaatacaggttctaatattggctctactgctttttagctgtctggacttgagcaccatacagtacactcactccaaaagcagcctcctctgtacaatggaataacaatatcagaggcttgtagcaggggaccttggacactgatcataagggatgactttcatttctctttcttttcttttcctcttgtctccttgcctgtctctctgcttagtcaggtccagtgttttcttgaagagtttcagtaatttcagtgtgagacctttatgtaaggtaaagagttaacacaagcacgtggcttcaaacttattggcaaattagaataaaaatggcaaagactctgtagttcttaccacaaaggcattgattaaaaatttgaggttagaggtaaacctgctgagagaatcttaactggataatactttgaggtcaattaaaatcactgtttaaaccgtcctctaagactgggattagaccacatattttataaagaaataaagaataatgtttttcctgtttgtaagaatcaacatctgcatagtctttgataggtatatgatattctatgctctctaccaaaagttttaaacaaggtcaaaaaacccatttgaaggaaattaaatgtaagaaaaattagttttgaagtttccaagggattaccttaggtttgggttaagtgtatttattgttccaccttttgggtaaaatgcaaattgactttccctttgtaaatattagaagtccttatttttattgaaaatattatccaaaaacaacaataacaaatcccaccctcctgggctaagaaccagaggagaagcatcctggatatgtttccagatctctattagatagttaagttttcatccatatttaacaaatgtcattattcagtttcatgggatcactgtgtcaaaatgtctgtgttagaactttattttcagaggttcctttaagtggtcaggaagcatggcatattggattgattactctctttaatccatccactgggttggtttgggatgtatacttaaaaattagattttatcagcactgcagcgggatcctcagccagaagtctcttcttctgccctccttcccctagccagttttcttttaaaaagtgggctcttccattatgtctccaggtagcagtagcagctctgcctgtgtggcatcccttaccagatggccctcttaataaatgtcttgctcttgcccaccctcactttcttgatccaaatgtgaaatgccagcaaataaataagagcattgtactctgatgagttctcttgagatgggggaaaaccctggggagaggaagctagaaacagcttttctgtttgctgtgactgctcctaattactggccagtagtagaagatatcatttagatgcagtagaatataaagataaagaaaaaaaaatgagagataaattctccatgttatcccaaatgcctttgctaacgtggaaatactcttggattgttggagtgcatttgaaatattgtgcatgatccttacaaggggacccctgactttggactcagggtagacagttgctgcatgcagatttcaccgccagactaaaagtgcaacggaaatgagtgggtgatgagagcagagcagccagttctttaattgaattaaaagctgggtgacatcaatgcagacacctgtccaattacagacaggccaaggtgtttaccattgctgtacaagcgattcgaagatgacagaaatctttccgcccacagattaacataatgaaggagaacagattacagtggatgccggccaaacaccttggttggcagctgggggtggggtgggggagggaggaggagtctgctgaagtatgtaagtagaaacggagtccttttttcttctctgaaatatgctcggctttaaaaaggatccattttgctttgtgtcttaggctcggtttccaggcagagcatttatacttgtctgcatttagtcagaggagttaatcataaaatttcaacgtgaaagcagactcctctgttgttttgctgcttctcagcatacggtgtcccattagaggtgcaaaagcttgcagagctggtgtcagctccacaatgattttgtcttaggtcgtcaggctgcctccaattattaatatttttctttggctcctttgaaacttgaggttacagcaaaggaaagagagtgttggagataataatgtatcagtcaaaagaaacaatgtctgtcactttgcttgttccctggaaggggcgtggtgggagtcaggctctcctatagtgagagaaatagccgagtggagctaacagtctgcaaaatcttaattttcagtcacccgtcaagtgctaacttttggtaaaccatactaatagctgctgggatagaggataaggaaagcagtaaaaggctatgccctctgtgttcaaggaattcccaaatcactgtgaaggacttctaagttgcaagttctctaggccaatgctcttcccctctgttaagtggaaaccctgagtgcacagagtttggagccatatgcagtaggcctcttaacctatctacggtgatgagtttccttcccttaaatcaagtccctgccccctgatctttcagcttgggctttctgcacccactgtggcccacaggacttcaattcaaagggaatctacttacttgacttcaaactcccttggtgtggcatgtcaggatttctcaatgttaggcattaatgcaaaatgcattatcgcttagcagtgagagttatggtcctgctggtgccaatgattttaatccggatacccacgctcctgtgtttcatgggatactaacacttttaagacatcaataatgcttactttatgcttattgaatgtttcttcagcttgccctcttccattacctagagggactagcaggtttcctgacatgattgggaccattttctgatttcacagagtttgtggctgaaaggcagtttgcgaggtcatctggcctgccttgtaatagggacactctcaaaaaaaaaaaaaaaaaaaagacttctctgggatgtgtcccaaacaaagagattcacaaccaaaccaattttaaagttctccctttcaggatatacttcttcagtataaaaaccccaagtgtcacaagtatcataaaaggcaactaccgcattttctatttttgggctttctgtctaggattcctttagatatgtcaattctctatttcccagtattctttttaatataataccaaaatatatatttaaattaaatttaggcttcctattatcttgaactggtaagtctgaatcttataaatgtcattgtctacttggcccgtatgcaaacattcttctttatgtatcaatctgttactgtaagaattcttctagttccaatattttcttatgttagaaaccttgtaaaaatcagttgtattctatagcaccttttccagacgcatatagcggaaacattgataaatgctttttgatgatgatatatcttcagagtaacactgtattttccagagagtacctaatctaagtagaaccctgacacttaaagcaaagccattaggataaccactcaatgatctcaaaggatatatccacaatctacatagtcttggagagaatgtgttactctctttctttggccatggcacaacttttcaacttgaatccatcctggtgaacactacttactgagaatcaaaggagataaaccacgtgtctccaacaataaaatgaccttgtcttgattccaagtgaatgaagaccacatatttgaccagccccttgcccttgcataacccttaatttttaacctgacaggaggagaaagcacagtgaaccattatagtgttcttcttcctgaagtaggtaattctaactgcctttaaggaaaattatcagttggtttgacaaactttgtctctgacacacagcatgatgaacaagattccctactggaaatagaaaagaaatggcactccagccttagaaaatgcagcacattttttgaaagtgtgatttacaagccatctaaaaccttccatctttgatccaaagttggcaagaaccaaaacatcagctttcttctttttctttctttttttttttttttcctttgttttctatttttcagctctcatttctcagggcttattattgtttcaccgggcttgaaatgggaaatgtgagcactttgataaatggcttgaaagatgatctagtttctctccagcatctttctttaagagtctcagggtttttctatgaaatacaatacaatttggtaaagatctctaccaaatcaaagctgaagaagcaagtttgctgagatgagcagtgcttgcttttaaggtccttaaaataaggagtggctaaaattaataaaagactctcactatacacatgttatacacaacgtaactcctttagtgaagacaagaaacattaaataaaacactaaagatcacttagtgagttgtgaactcaggatctggtttgatacaatccctctgaaagtctatagaatacccttccttataacttgatgtaacaattaaaatttcaacatttcactctagttatgatttggaaagaaatgtcttagtataaggaattttataaagccaggctgtaaaattgtacaatcatagagctgcttttatatttctcaatgataatacttcctgaatgtacaacacatcttcatgctaatgattgcagataaccaacctgtatatcagcattgtttctttttgggcatggtgttcctatgcctcagctgaagcatgctcatctatgaagggtgctgcttttcacatatgccccataggttaagtgatgataaagggaaactagcctcatattccaacatgcttttccttattgacattaggattaaaagtcttattctctgggggctgattcatttcttgttagcatggcgttatactaattcagccatgcaagtcatcttatttagaatcttacggtagtttccaacttggcaataggaaagacatggcaaatgccaaagatttgctaaagatagaatggctaaaacacattttatgatgataactttagttttgagcctggaatttgggtatcgtggtggaggcattacaaaatggaaaaatgaagcttacataattatttagaatgttgattcttggttggggcacgttgagtatgaaataccagtgggacatccaggtgtggttacatggcctgcagatagaaacccagaaccagggcttgggagagatgtgaagtctgtagatacaaatgtgatcactgaaagataaggcttaataagctagcaaaggcgagtgtttagaaaaagaaagaagcttgacaacaacccaatcttgagaaacaaaagctatttaagagactgtgagaggaacatgagtcagtaaaggaaacaaaggagttctcggtagtttaggagaacaactaaaaagttcaatgtcacagaaggaagttgagggaggataaggactgaggaagggctatttgatttggtatttaagggatcactgctgatctttaaaagatacaaagcgtcggccggccgggcacagtggctcacgcctgtaatcccagcactttgggaggccgaggcgggtggatcacgaggtcaggagatcgagaccatcctggctaacacggtgaaaccccatctctactaaaaatacaaaaaaattagccgggcgtggtggcgggcgcctgtagtcccagctactgtggaggctgaggcaggagaatggctccaacccgggaggcagagcttgcagtgagccgagatcgcaccacagcactccagcctgggcaactgagcgagactctgtctcaaaaaaaaaaaaaaaaaagaaagaaagaaagaaagaaagaaagaaagaaagaaagaaagaaaaagatacaaattgtctagtagcatgtagaggcagaaactgagttgcaatggtagcctaaattggaatggcatagctctgcactagagctcttgactggcaatactccatgtaagtattctaaagtcctgaacttgttcagtcttaatactaaccctttgaggtaagtactatattatccccatctcacatgtgaggcctgcaaggcctttccttcaagaccgagattattattatctgtttacagactaggaaactaaggcacagaagtctgaacaacttgcccatgtacatatggccaatcggcagcagatttggcatttggagccagcaatctggcttgagcatgggtgcccatttccccactactccattatgaagatgtgcatgtgataatgttagcttgcttttaagccatttggtggaaggagaaataacttcttaaaagaaagtaaactcagaacgtaggtcatgatctgggagatttaacaggaaatgacaatcgcaggggcaggaatgagagaaagcaggaggttctgacacgagagggttttgaaattagagagagctgaatttggcatgagatggtcacacatgtgtgtatattagttcgttggcttgctgtcttctttggccatgagctaagatgacggtgccaagtggatgaatattttcatgtagaagcatggcagacaggattcagtagcccacggagatgcctgggtcgttgctggaatgaagacttagagacagccctaggaactaagggcaagtgggaggtgtcaaagcaaagaactggtctttgctccatcctggcttgttgatcttttaattctttaaattttctactggggagggaaattatggaaacatgtatattaaaatttgtgtttgaatgatgaaagctgtcatcaaaattggcaccttaaagcaataatgtattctctgagcgattgaaggtttcatcaataaagagacaccacgagtggggccatctttttataaaaatagtcataatctatgtggttaggattaaagattgctctgaaaaacgtctttgcggaaaaacagtggtgagcaaaagcacaagttatattttggattttttttaattcacaggattaactaaataaggagtctctgccttgcttatgaacactagtaaacaaaatgtgttttcatttctacacatacttttaattgctgaacaaatctcatatatctaccagcaagccatgttaattcaatacttccacgtgtaacacttccgtttaagacaggtgtcttaattaaataaactaataattttgcaagtagaagtacaaaagcataattatctaatttgctaattgttcaactatgttaatttgcatacttgttagctacaacataaacaaatggtttgtatatgtatcgcctactgttaaaataatgaagccactcttgggagtagcatttttaaagtgtgttaataggtgccctataaaaaggactccttagttaaatacggttgaaaaatgctaggttaaagaaaattaaatagttttgtttctgcaggaggtctaggatcctggaatgagataatatatatcttagctattggaaacattgtgctctgcctcacgaactatatgtggaaccccctccccattttaatgggagaaacatcagatgctgtttgagagctgttttaacaataagttggtctcacaattttttctcatgagtccttccattcaacaatcagcagaaagggaggaaaatgactgaaagaggaatatgtttttgatttctgtctctggtctctttgtttttgtctctctctcttatagacacacacacagatatacacacaatgctctttattgatgcttatggtaaacacgcaaccctcttttgtccctttttattataggcatattgacaggcttgctacccttcaaaaactatgcagtaaccctaactgcttgcactttggctggctgtactgagagctcacatgcattgaacatctctactccacaagaaggtaaagtaatttcaaaggtcttgacttccacatttcagtcatgaataataaaataggagaagagctaaatgctacaaggccatttgctggcaaaccccaacctaatttgatgacaaagtgcattgccaggccataattgctccattttttgggggggtgcgaaaatgaatcaaactccataccctttaatgacatgcatctttaatagctgtaatgcagattaatgggctttttaattgctgttacattgttcatgcaagagccttgtcattaatatgaagcatctgaaagattaatgaaagcttcctcattttactatggctcagaagtaaatctagagacagtctgactaaaaagaattgattgtatggcacagtatgaaattgagaatcaaacggttgatttccatggtcttttttaactgctaaacagcagcacaggcaacaattatttcagtatgatgaaacctccaaatgccaattgaggcattattaatcactgcttagttccttccaacttaagtctcacttctgttgtacttggaacttacaaactgttggcataaattaaggtttcagaaagcatatgttaagaaggcagtgagaaagagaaaatattttagcacgccaaagtgaaagctttgctcaagcatcagaatgcatcacttcaagaaataacagctctcaaaacatttgaagcattgttacttcatatttctctattctggataagaggaattgtacatatcttatactgtctagttgaaaagttctttaggagatttaaacgcttgatctttagggaaaaagagtcagccagtctttctctctctctctttcccagtatctatatattccccccttcctcttttaaaccctttaccaagcaccacttgcactgaagatatgtaacagaaaggaagacatggacccataggatgaaaccaggacaggataaatgactttgtaaaatccttcttgtgacccttaatatgctgtattttttacctaaaccaatcagactcccctcacctgaactatgctgtcagtgacccagcctcagcattttctccatctggtctactggtaatagcactgtttttgttgtatcattgcatctgctgaggacatgattatcatcccctcttacaaggactttgaccagcctcaatatgggacaaatggccctatgttgcattattttctccgtatccactaaatcctttgtccagggtttacctggtacccttcataccaatttcaagctaagccccagagagatccctgctcttgtttatatttccttttttatttttaaagacattcccaaacttctaaatatccacgaagtaattctgaatttactaaatgatagaggagtttaggaaaatttaaaaaaaatgtttagttcttaggaccccccaattcattgacaactatataaaatacacagctctttttaaaaaaatatgcactaaagttttcatatgtaattgactaatttggttatgcgagctctggcaattcttatcattacatataggtttttaaaaatttatattatgaaccacattcaccagcattactcatctcagatcacaagctccttgaggctaggggactctatctgcttaatttgctttaataggtacagtcccacatagagattatgggttaatagtacttttggtggagtaacacaagcatcagtcaagtgaactagtgtaagtactcctcatccatcattgacacaaattctcataaatgtgggacagttatttaacactgttcctaaagcaattactgacaagctgcccacgaatcgggaatatttccatgcatgggatttcaggtttattccatgatttattggtttgggtctgaaaagtttgaattagaaaagtaaactaaaattagactctataaatcttttcttccacagccccacaagaggttcagccaccagtagccaaatcccttcccagttctttgctgctctcctggaacccacccaaaaaggcaaatggtattataactcagtactgtttatacatggatgggaggctgatctattcaggcagtgaggagaactacatagtcacaggtaagacctctagagttatcagcgaattgttatagtctatattcaaatataaacatacatatagttggctctcgatatccaggggttccatatctgcaaatttaatcaagaatgcttaggaaatatgtgaaaaaaataacaacagaacaattaaaaataatataaattctaaaaacatagtataacaactatttacatagcatttacattgtattaggtattctaaggaatctagagatgatttaaagcatacaggaggatgtggatagcctatatgcaaataatacaccacattgtaacagggacttgagcatccatgaattttggtatcagtagagggtcctggaaccaatctctcactgatattgaggagtgactgcacacacacacacacacacacacacacacacacacacacacacaccagataaatagagtctatagttatctgaaaatgtgtttttgaaattgggttgcttatttttatctcctgttaatcactccaattgtatgatcttgaaggtcatattagattcatggtgaaactgaagctaaaaaaatatggaaaagtgctcatgttacctccctccacccagggctgtcctactgtgtgttctcttctatagagcccaccaccccttacctaaatccttctagcaattacctttgctcagatgcagaggaggcctggaaatgcacaaatgtgctaagcacaaagagctcagcacatgacttctctgacttcagcagaccacaaggattgaaattgggagccagtgttttcccagtcaggctcacagtgtccagttggatcaatgacatcatcaaataaatgcctctctcacatgagctattagagtggtgcaaaagtagttgtggtttttgccattgacagtaattacttctgtaccacacgaatactttaaaatcctcactaatgtgtaatagtcttaagactcagaagtgtgactcagtgtggtttgaattttagatcttagaggaaacatagtatatctgcccatatcatattataaagtgtgatgatactgaaattaaatgaagtaaattcttgaaaaactttctaaatacagaagacttgcattatgtatgctgcctgtactgtgtttatatttgtattatacttatagtggttttgtatttcatattattttatatactgtatgtgactctcatgtgagacattattaatcaaatgttgactgatgaaaaaaccaaggcctagagatattaacttcttcataaaggtcataacaagttagagtcagaggtaggatgaattatttatgtattcactcactcacattaatgccaggtactaaggttgtaatagggaactggccagatactgtccctcttctcttggtgctcacagcttcatgggggcacatgtagatgctggagcaagtcgtgtggacagggctgtgtattcatccagttgcattctcaggtttacatttttttggcccccctctagtctgagaaccttaaaaggacaagaacaattacttttatattttattattcataattggatagaattccataatatttattctacaacataggtattattttacaccccaattttacaagtgaagaaactgagggaaagaaggattaagtaacccaaggtcacacagcttgagtcggaggctttggtactaacccaagcattccggctgtgttgaagaatgtggtcttaaaaacaagtgttttaacttgtcttagtttctgaatttgtaaaatggtgttaattacattttccagtattttaaagagaattagaactatatataaaatataacatgtcattagcaattggtaaagagaagttataattgttatctcctgtacaacacagagttcattgtaaaaactgaataggttaatcttactccaacagtatcttatggcatgattttaactaaaaattataaaccacagaagttatttcagaaaaaattaaatcacaccatggaaggaactttacatatattacatctttgaacctttacatatattacatttttacatatattacatctttgatgtaacatattaataattaacatacaaagcacttctgtgaccaagaggtaacattgcatgtaatgggatatcataacttttagaaccagaatagacatgtcctctgagaatccttttgctccccacgtgtgacacaggtatgccccgtatgcttactgattacctttatattacatcgctgctttttgtttgtgtcatcttgaataggactgtttgtttgttcatcggtttgccctgctgaaccataatgatcattaaggacacaactatatttgtttttttcattactgcatctcttggacctatcacagagtgggaatggaataaaaagtgttagagtgaaagaatgaagtcagatgattcctgggaataaaaacaagaagatagcaaaggggaactgatggaggataggattagggtaggaataaggcaatagagaagagagaaaaatggaaaagatacagccaggggaagagaaactaagaccccttccatgcgcctaaacgaaagctgcatcagtccacagggaagtggtgcagctaatggcaggtctcaaactgtgggccttgactctttccaaaatgtacagaactccatatgaggttacactggacaaaaccggaaaaagggcagtgtagggagaggaggaagaattcacatcaatttctaataccacctgcaaaatgacactgaattctgtattttgtttgtttgaattatcaagaacgccatgtgactataggccctgaagaaagattgtggtaaatggcaccatagtgtattattacaatagaagccccaaatataaagaaagtgaaatatttttaaagtgcctacatccatggtaatagattgattcttcaatggttttctatctttatgtaatattttaaagaatatatctccaatactacccatagcatttttttttctgctgtagctttcttggcatttcataagcaactatgttccttgttgctttcatctccaaatagtttaagatatgaagcatattgggactgcaatgctggtcaaggaggggaaataaactgagaaagttaatatggggttcaaagatgcacatgattattctaactttatagctagaaaaactgagacctagatgggttaagaaactctagtcagtaatcagaggaactaattcaaatgtagatctgtctggccccaaatcctctgcttttaatttctatacattctgcttgttgctcatattttattttcccttgccagaactctaaaagaaagaccccagaacacctgtattagtctgctagggctgccatgtcaaaataacaaaactgggtgactttaatagaaaagtatttctcacagtctggaggctgaaagtccgagaccaagatgttggcaagcttgatttgtcctgagtctctttccgtggcttgcagatagtggcctcctcactgtaggtgcacatggactttctttcaggtgacttcatccttggtattttttcctcttcctctgaggatgccagtcctattggatgaggttcccactcttacgaccacagattttatatcagtgatatggactaagttcaggtcatttatatttttaaagtttagctatctacagagactctcagagaagactaaataggaaagggactctgtctgtctgaagtcagcaagggagaaggctgtggagaaactgatctagccattgggatgggctttagcttctatgggcagtttaagtctacaccataacatgtatctatctacaatgctattggtacttactgcttgtctttgtgtcagggtatttgtgacatagtatcttttccacactgagtggcttgtgggtagaacttctattcatgatgtctggtgatttcaataatagtgtcagtttaggtctactaaagtggatctgtatagagctgaaatatctcttcatagagaaaccgagaagtggaatacagagtttactagatagggaaaataattgataatatctttaattataaaagtgataaattcttacagaagataatttaaaacatgcagacaagtaatacctgagaatcctgtcatattgaaactcataatatttgatggaattccttctactactttattcatgttaacaaaattgagctataacctatgtatgatattgaatacatattcccttattatattatgactatatcctatcattaaacatttttgtaaaaatattttgaaatgttttgaataacattatattccatctcatatagcatataatggatatttattaatgcatttaaccatttgagcaatagtatctaatctatctctattttaaatatcttgacatagatattcttatacataaatctttatttgctaggttcctagaagaatagctaaatcaaaggtaatgaacatttgcagaatgtttggtatagtttgtcacattattccaggaaagttgtcagcagtgaattttatattcttaaatatttgattattttacaaaaaaaaaagttattttattttaatttgcattttaaagtactagttatagtgaatacttttctgaataattattaaccttttatattttcctttcattcatctaatcacattcttgatgagcaaaaatttaattggggtaaggaataattttgagacttctccacgagctatcctgttttttctggttacaatcacccacactgtttaaaatgttttaccctctacaatatcagaaacttccctactaacttggtttaatgtcccctcctaaatattcaaagtgtcaacaatttttttctcactcctacttcatttacttgtagtttccctttaggtttccatatagaatcgacattcttcccgtagggtttgccagtggatcttgctgccatggggggcacaagcaaagtaaatgcatttcaattcagaagccacttagcatccaggtggcttggatttttttttcttctttttcttaaatatgaagcattaaaagtcaaaggcattgctgcaccttgagttagtacaaaatttattttaaaatgcatacagttcaaattttttaccttgcataggccataagctagtagtatggtgggtcagttctgacactgaaaaatgaatccagttagagaacctcccgaaggctgttgatgtttgctataataaatagcacacactttaagtcaaactttttcattctgtattcaaaggtaatggatttttcgtaaccatagtaaccttggtgtattctggataaatacgtgaggtatatacattctagttttatttttgaatataaactaccacattatgtattactaataatatgaaaaataggatgtaggttagtataatgacagcttaaactagtatgcattttccttctgcaaaaaataaatatttatcaaaagtataggttcaattaatttttctcccagttttgtggtattctggtggtgccatttatctttttttccaagatctccattaatctcttatttctgtcccataacagatttttaagaattttgaggtaaaaacaattgtactttaaagcttatgattaaaaacataatcgaaagattgaaggacctatattgatatcactagcagagctattgtgggccacttaagatgtgtgtatacagtacattcccaaacaagtagacaaaagaaatccttcatgagactgttcaacataccaggattgtttcaaagttcaggctggacagcacctgatcgatgatgactatccagactgtagccacagattattcttattttaaacgagcaccctaccagaaactggccgtttttaagaagtttataagatgtttccaaaaagcctacaaactttttagaaacaaaaatagcaagatggtgctaatcaggacaagtctccaccaaacccggcaaggaggtttatgcgagttgtgcttcctagttagaaaatactacctgaattgcttttggttaagccaacctaagccattgctgtggataatgactagaactccaaaagaggaaaggttaatagggacattatagaaaaataacaactatctcacaccaagccataacacgtgtgttttcaaatgtatcatctgataaatctacatagtcatcttatagttaaataagagtgactgatatctagaaccatagatagtgtcttcccactgctgttccatcaggacctggatttctatcactaagactgaggcagtaagatatagataatagcaatgtaatgagtgtgtgcatgcgtgtgtgtgtgtgtgtgtgtgtgtgtgtgtgtgtgtaattgagagacagaaaaataaagagagggtagaaaggcagatgtgggcagggggaaagagggaggaaaagtggatgaattctggtaaaatcatataggcaataattatttatgtctaaccaactaaaagtgctaaaactttttttttggtcttatttgccaaggtcaaagagaactatgtgtaaatagcaaaatagaaatgctcatcttaaactttccaaacacttaagtcttacgatgggaaatttattgacgaagaagctgtattgcttatggcacaataaaaacacatttaaaggttaggcacttctatccgagcgttataaggaaccttatcagcactctacaaatttgagctaaattatactcattcacaccaatggcttacagaagctcttttcttagcaaaatagaattttactttaacctagatattttctttattttgcatatttaaatatcacattgcagtacattgaaataactcctcttacataaaaatactattacctaaaggaatgctgttaacacgcctgtgttctgttacaagctctaatattaataaagcagagcatgtgaggatttccaggtaagatgacggtctcatccatgagtcaccatgccactctattacaaacgaggtcataccatgtttccctttgatgtctcagtcatatagtattaaattgtacaaagtctgagaaactttaaggacacgaaggaacaaaagtcaagctatgcaataagtagagccttcaaagccaaattactaagctactaactctgtgaccagagactccagaatagttgttcaaggttgttctatataccagatctttgggttaatgaacagtggatgctatactctcaagagtcttattcatcgagcaacaaagggtcaaatgaaatgaaataacttgtacagaatgtttgaatatcagttgtggttagctgtaaacaatacaacctaagtgtcgttcttccattaaggtgcttctataatgcacccgtatgtgaagaaataaaatatgtttaaatttacattttaagacccgtacccaaatattatatgatctgttaacctaattaaggaatattatgttcgtaaatgatagggaaagattctatgcttaaagggattttagaagaatcatgggaataatattcagttagaaaagcaatggagttaaatgctggaaagataacggaatatgtccttcagttgaaagtgttacaaatagaggtgtcctgttattttcagcattttgagagttgctatgattttttatgtacgttttaaagtgcttaaattgagttataaattaatacagaaaagtggacacatcttaagggtacagcttgatggatatttacaaaggaaacacatctatggaatctgtacccaaaacaagaaacagaacattgtcagcaccctgtaaagctcctcattttgtggcctcaaatcttgactcaggtgattgctttcctgagtgttgacaccataaactgattttgctaattttgtactcaatataaatagaataagaaagtggagggggggtcttcaaaaagcttatggaaaatgcatattatgaaaaatgtgaggatttcaattttttccaccaaaataaactcatactaacttgttataacattcctgaaccagatctagtttgaggtggtaagaaagttaagacatcagtctgaaacaagcccctaccagggcaacatgaattcagtaaaattgaagcaaggacaaatatcaaatttctggtgaagcttgcatagaagaatagtgaaatcattgatgttttacaaaaagtttttgaggacaatgccccaaagagatcggcagtttacaagtggataactcattttccttaaaggacaaggaacaagacagtattaaagatgaagcctgcagtggcagaccatccacatcaatttagaagggaaaatattcattttgtctgtttcctaattgaggaagacaaacaattaacaaccaacatcatacacatctcaattggttcactttgtacaattctgactgaaaaattaaagttgaggacattaaacttagcaagctaacataggaacggaaaaccaaataccacatgttctcacttataagtgagagctaaatgatgagactcatggacacatagaggggaactacacatactggggcttttcagaggtggagggtagcaggagggagaggattaggaaaaaaaaaaaactaatgggtactagacttaatacctgggtgatgaaataatctgtacaccaaacccccatgacacaaggttacctatgtaacaagcctgcccttgtacccctaaacttaaaataaaagttaaaaaaaagttgagtgaactttctacttagtgggtgccaaaactgttgcacccagatcagctacagacaagagcagagctttcaatggaaattttaaacaggtggaatcaatatcctgaaacattttatcaaataattgtaataggagttgaaatatggctttaccagtacaatcctgaaaacaaagaacaatcaaagcaatggctactaagaggtggaagtggttcactcaaagcaaaagtggaccagtcaagagcaaaggtcatggcaaaagttttttggggatgcttgaggcattttgcttgttggttttctggaggaccaaaaaacaataacatctgctaatgatgacagtgttttgagaatgttagccaaagctttagcattaaaatgcccaggacagcttcactagagtccttcttcaccatgatgatgcccctgctcattcctctcattgaacatgagaaattgtatgacagttttcacggaaaatcattaggatcttacagttctgatttggttccttctgacttcttttcgtttcctaatcttaaaaaaatctttaaggagcacccatttttcttcagttaataatgtaaaaaagactgcattgacatggttaaattcccagaacagtcagttattcagagatggactaagtggctggtatcatcacttacaaaaatgtcttgaccttgattgagcttatgttgagaaacaaaggttatatttttattttttaattccattttccatgaaatttttgtagttcccttatatgttctcttttgtcactgtctttttcttagagatataggagggagagtaaatcagtacaacaattttttgtgttcctgtacctacattcagaaccctctgatctacaggcaattgctaagatgttgttagttgttaaattcctgtcttccagaaagccattggaaaatttgcaaactgaaacatctacctctttctccaagttcagatctagaaaataattatagaaatgcttcatctgtgcaattagaatttagcacatgaagtcactgacccgtgtacactagcaacaaacaaaccatataaaccattctgagtttccaacaatgtaatgttgtgtgaccataaagtttatgatgctgtagaaaaatatttaatttggaaagataataacaacaaatattttacacatatttgagtctaattcgttaaaatatatgtgtatatacatagatacatatacatggatgtgtacatatacatatataggtatgtccccatatggacatataccaaaatactaatagtgattatctcttaataatgggagtctggtattgcttttttttcttttccttgagagtcgttcaatcttttaaattctctacagtttggatattagaagtcagattctttttgtaatgttattcccaattttaatatatgtgataaaattgatagaaaggaaagaaatttcgggaacctgactacacttaaccattaatacttatctctagttttccctagtcttcaccttatatttaatcaggttgatcgtcttactaatttccttctagccaataccatagatgacctctagcactatctaccaccatcaaaacgttatgtatatttgatgatctacctcaattcccacatcttcatttgactcatagactcttccatatcaaattcctacacatttgtcatttggacacattctatcttgcaatattgacttattttcaaaggagtaaatcttgattaaaaataagaatgtaagtgcattggttacagttattatgccattatttattttcaaaatttctgtaatatctcacataggaataaggacccaactggcatccaacaaactcactgaattgagtttaaatgaattaagttgaaaaaacactgagactcagtaaattaatattttagagaaaataacaataaataccaatgcataatttggatataattaacatgctaaacttggtaaacaattttattgaggtaggctttcctgtagcttaggatttttcatttaatcatccaatatatagcaaatatatacaaatatttgttgctcaattatgtgttttagcttgctaagactattgtaacaaagtaacacaaactagatggcttaaacaacagaaattgactgtctcacacttctagagacagggagtcccagatcaagatattggcaagactggtttcttctgaaggctatgaggaggaatctgtttcatccctctctccttgttttggttgtttgctggcgatatttggcatttcttgattgtatatgaatcatcccaatctctgccatcatcttcacataatgttttccctgtgtgcttatctgtgtacaaatttctcctttttataaggacactagtcatattggatttgggcccaccttgttgagctcatctgagctaattacaactgcagttctagaggctaggacttcaacatatgaattttggggagaacacaattcaacgtgtaactctagtgctgtgcatttgatgctgtgattaataacattctaaaactttcctgaaatacctaaaacatattagagaatttaaggtgtgtgttcacaatcagttttaagatggatatggcccatgacagtaatgaaaatatttagaaaaggtgataatcaattccatctggaatgctcccagccttactttttgcatcttcacaatcacatctcttacttccctggcttgctttctttgattctttataggagtgattagtttcctagtgctgcttaatacaatacccaaaatgggatgccttaacacaatagaaatgtattctcttgaagtttgagaggctagaagtttgaaatgaaggtatcagtaggcccattgtctctctgaaaactgtaggggagaatccttccttgcctatcccgccctccagtggtttctggcagtcagtggtattctgacagtcagtggtttctggcaggtgtctgtcagtcagtggtatcctggcagtcagtggcttgcagttgcgtcaccccaatctctgcttgtatcattacatagtgttttcccttcttctaaagttctctcctcctctaaggataacagtcatattcaatttagggctccccgtctttcagtatgacctcaacttaacttcatgacatctgcaaataccttattttcaaatgaggtgacattcacatgtacagggagttaaaacatggagataccttttgggaggacaaaattcaatccactacacctccattgactccacaactactttgccactcagttgaaactgttctcacctagattgtcaatgttctggtagtctccaattcagggacagagtggaggttgtataattcatgatgttttattgatgattcctccatctcagaacattcttctcttggtgtctgtgatacctcaccttctcaattttccctattactgttcaagctctggtgtgatctcttcctcattttcttccacgcacaaatgttggtttcccccaggattcctcttgaaacattccacacaatctccctttgaaaactcagtagtccttgtcttcagatatttttcctaagccatgaacatttttctcactgcatattgggcactcctgctacaagtgtttttactccaactccttaaaactgaatttattttatctgccacatcctaccaatgtgctcttttttctgagttttttatctttgggaaaagtaacactattcattctttttcccaaacaaaaacccagcattaatctttgattactcctccttcatccttcacatccaaacttttttgctgttcttgttttaagacagggtcttcctgtgtcacccaggctggatggagtgcagtggcgcattcacagctcactgcagcctcgacctcttgggctcaaatgatcctcttgcctcccgagtagctggggccacaggtgcatgccactacacctggctaatttttgtagagatgaggtttcaccatgttgcccaggctggtcttgaactcctgagctcaagagatctgcacatccagtcttaaaatccaaactgctgttgccctattacacttatcacctggctcctatctactttcttagccttatatcattcttttattctcatttatttctacaacactacattggttttctatttctgttggtttgttttgtgaaataccacatgccttttcctacatgcagacttttgaactttctgttcactctgactggaatttactttccccagttctttacatggctgaatcattgtcttccttgagttctcagatcttataaaaccttctctatatttgttagaataacctagatgttataagcatacacacatatacatacagagagatgatagtttttaatagtgaaaacacaataaaagtttatttcttgttcacttagcattgagtgcatacaaagtttggtccacagagtttcctttttctgcacagtcattcaggaatgcaggcagatgcagattcagattctgtcttatttaacacatgacttccaagggagctctggagttatttccattgctacagcagatgaggaagaagattgagagatcatcatggcagattgttatgggccaggcctgggagtgaaggtattaaagcaataccttgtactaactcaaagttctgtaaatcagaaatttgggtggatttaattgggttcgtaattagggctttacaaggccaaaatcaagagttggggcagtttgggctctcatctgaaggctctgggaaataattcacttctagactcattcaggttgctggctgaattcagtttcttgcagtggtaaggccaaggtccctgtttccatgttgcctgtcagtcatgagctgctatcagcttctaggggccacctcaggtcctttcacatggctccctccatctcaatgatggaggatatccagtccccctcatgcttcaaatctctctgacttttgcctccagctggagaaaacactctgctttaaattgctcgtagttagtttgcacccaccaggattcatttccttttctccatataaggtaagataatcataagtgtgatatctcatgaaattcacagattccacccacactcaaagggggaaaattgtatataggtgtgtgtcactgggagtcattcttagaattcttcctaccacaggttcagaagcagaatcactcaagcatggttcttaccctgtgaccttactaagccttggtttcctggtagaatggtaacaacagtacctactttagggatttagtataaaaattaaatgtgatagtgcatataaaaagattagcataggtcccataactcttctaaaaatggtaaataatcaacaacccatgctattagtcgcagaaataaggaaattattgttatatcatcataaatattcttaatgcaaaacatcctctgcatgcaaaaaaaaagcatgtctctaaacttcatgttcaatttaactcagaaaatatttgttgagcaggtactatgtacctcagaggttagaagttatttataaaactaagatactgtcattcttcctcaaatcattcccagttcaattgcttagacagaaatacataaaactaaatagaatgctgtccaacctgtggtaaattctgtaacatgtgtgacaacaaaagagaagggttcaacccagtgtggaagataaagtgtcacagaagaatgttcacaggctttagagtcgagtttaagaactgaggaacaggcaaacataaggaccatggttgcgtagtcactagacacagaactattaatgcgcatttcacaaaaattaaagagggaagagtttaatatgagtgtgcaccctgggtaagtaatcaatagtgagaagcaaggtgggattgagattatcaaaggtgctaagttatgttgagatatttgaactttgttctgaagcaagagagaaccattgaaggattttcagaaataccacaagacaatcagtgctttagaaaacacatagttggaacatatcattgcttcaacatagcgaagactgagtctgtgtagctgttttctccatttagcaggcataaggacaagtgggttagaacactaaatgcaagaagctaattggacttaacaatacagatggcaaaaggatgaggagaggagagaaacgcattatgtttatttgttaacagctctattgtattgtatttatatgcattagtcagtgtaaaataaaatctgcttattttaaatccttttaaatagtgtttaaatatttcctgatgacacaatctgctaaagtatttacccttggtgcagatttccattaaccttgctgtagatactaagcctacaaccatatatttatagggggctcaattatggggtaaagcctagtgacatcattataaaagcacatctggataagctttagggtctttgtctttctatctgatttaggaaatttagtaaactgtaggagaataccattattaacagcccctgaattctcagattatgaggatgtcctttctctcaaaataaaggaagagagggattaaaatctctaaagctgtaaatgatatagagaaatgcccagtacacagatatcagggatattaggggaatccagttgtgttggatatacaagaagaaaaaaaaggcagaaattaaattcaaagtattctttcctcatgtcttttgtcagtttttttttattgttttttagagagtctatataaatcctttggttccctaaaggacaaaattcctttgataattttacaaattcttttctaaatagtatctctgtattgtagattaaaaaaattaatacctaggaaaggtcaggtcacttctttcagtcaaggaatgactcattcatgaaactggaaagaaaacttctttttcactcaccccaatacttgatagctatcttaaattgaatatgtctttaacagtatatttgatattatcagtgtattttgatttatatatatatatcgtatatattatatatctgtgatatatatctatatatcatttatatatctgtgatatatatctatatatcatttatatatctgtgatatatatctatatatcatttatatatctgtgatatatatctatatatcatttatatatctgtgatatatatctatatatcatatatattatatgtctgtgatatatatctatatatcatatatattatatgtctgtgatatatatctatatatcatatatatatctgtgatgtatatctatatatcatatatattatatatctgtgatgtatatctatatatcatatatattatatatctgtgatatatatctatatatcttatatattatatatctgtgatacatatctatatatcatatatattatatatctgtgatgtatatctatatatcatatataatatatgtgtgatgtagatctatatatcatatatattatatatctgttatgtatatctatatatcatatatattatatatctgttatgtatatcatatataccatatattatatatctgtgatgtatatcatatatatcatatattatatatctgtgatatatcatatataccatatattatatatctgtgatatatatcatatatatcatatattatatatctatgatatatctatatctctctctatctatctatcacattttctttaaccattctatcagtgatgggcatttaggttgattccatgtctttgctatcatgaatagtgctgtgatgaacatttcttttgatttttattgtctgtgttaggacatcataacagggccctcctaataccattaacaacgcatcatgaccctggtaatggttttgtagctgaagtctagatagtttaagtgccctatcttattcatttgtacatattcaatatatataataactactattttctggacgttaagagaattgctgaaaatacagtggtaaactgcaatgaccctatatatcctggtttgtacactgttttatcttctgtttcagttaccttgcttaaatcttgtggctatatgacactaataaaagttaccaaatttgtaataaatagcatcacaaatatttcattgtgcttgagattgtttcaaaggttttgatttttctggctatacacacacatatgtaacataacataattaaaaatgtaatgaacatcactagactactagttaaacaagttatggctaataactaatatgtacacaaaatatgtggacacaatagaacaagcaaatctttatcaataggagaatatcttcaaagtgtatattgtaaagcacttgtgcagaaaagtatattctatattctgctaatgtttatttgtttggttatatgtatgtagactacatctggaggcatacatataaattcaataattgctaaattcctaggagaaaactgggtaatagtgacacaaaggtggagagagtcttaatttttatgtaaggtcttctgtacattttggctatcgtaccatgaatatatattaatgcattattcattcaaaattaagtacaatttaaaaataaaattactacaaaatggtaaattttaaatgttaaagaaaacttggaaaaatataaagaaaaattcaaattgtccacaattttatctaccagacacaatcactaattatattttggcttatgcatttaaagtctgtttttttattattaaagcacagatacaaacatataattgggaccagactgttttacaactttttaccactttataatatactaagcttattaccaaattgcttgctcagcattcttttatgtaacattttgtgtatgtgcattttaagttttttaaaattaataccacaaatgtgtttatgcattatttaaaatgatatattcttcttcctattttgtaaatgttttaatatatatgaaggatgctaaccatttgcatgcactctatatgacagttatttttttccgctttgtcttttgtatttttttactttgtttatggtggtttttaaattaagacatttttaaaacttgtagtcaattcaaatttagatatattttccagcatagtgtcttccttaaatagaaacacttagattttcttcacttcaagaatagataaatatttcctgagattttctttgataatttatactttcaaaaatattttcacatattccagcttctgtgaatatttttatttatttatttatttatttattcatttatttattgagacagggtctcactctgtcgcccaggctggtgtgtagtagaatgattttggctcactgcaaccccgcctcctgggttcaagccattctcctgccttagtctcctgagtagctgcgattacaggcatgcaccaccacacccagctaatttttgtacttttagtagagacagggtttcaccgtgttagcccggctggtctcgaactcctgacctcaagtattccgcccaccttggcttcccaaagtgctgagattacaggcatgagccactgcacccggccacttctgtgaatctttaaattacccaatgatgtgtataagggttcaaattttattcccattttctcagtgaagaaatagagattctgaaaactgatttgatatgcctgaaatcataaagttagttaatgtcatcgctaggactagaattttggtgcttacacaatgtgctgactcccaaatcgtaaatttctaccagatgtttaaagtaaaagaatgatgggaaatttcattaaactattaactatattcagtggtttcaaaatattaatacaacattgatatctttagtgcattatcaatgtattcttggagacaacatgtcaattaaattgtctcttattcaaatgttaacttcagtttttaaaatttaaagctagtctgctgattttcaataagagctgtctaatattgtgaactagtgaatttgaggagataaaagtggaaattataggtctgcagagtgtagcattgataaagagggggccatttcttccaagtcagtaaagaaaagtgatgaaacataaactggaatttttgtgattctactgttgcatgaccttataacacccctgttttaattaactacggacctgaaataataacgtatatttctaatccactcacaggaatggtaggtatattagttagctagggctgccatgacaaaatacaggctgagtggcttaaacaacaggaatgtattgtcttacagttctgggtgctagaagtccaaggcaaaggtttccataggttaggtttcctctgaggcctctctccttggcttacaaattgccgccttcttgcaatgttcttacgtggtcttttctttgtacacgcacaccctggtgtctttattcccatccaaattttctcttcttataagggcatctgtccgattgaattaaggctcatcataatggccttattttgacttaattacctctttaaagaccacatccccaaatatggttacattctgaagattagaatgtcaatttatgaattttggacggacaaaattcagcctatagcagagggtctgctttgcaatgattatgcactattactcaccaaggtagtaaaaattaagcaaacatttatatacacaagtttttgaggggataaagcctacagaatataagaacaaaatattttcaagaatgcctgtctgtggttctttcattaattcacttcttcattcatctttattgagtacgataatgaggcagggaaaatataaccatctgactatgaattgacctggtgcttgtagacatatgtggtttaacagttttccactttgtgtacccctctctcataacatgtagcatactctgctagaattattgattgattaacctcattgtctttctcactagatcatgagtactttgagggcaggaactttatctttcatctttcatcctgaagacatggatcagcatatgtgtatagtaggagaacaataaatagttttcagaatgaaggggagaattaattttttcatgaaaactagatgtcattatgtggagaatttatcagaatgccagactggtaaggatgttcagagacacagtagttgacctaagactaacctaaatctgtttgtatcacagaagtgtaccaatgcttgacatacattggataaaatgtttatttcctatttctctgtattgtttggccacatgactattgcaaagctcataagcacaaaatttgcacaaaacccctgagagatgccatccatggctacaaatacatgttttgattatattaaagtaaaaaaattgatcaattattttaaatattcaaggtagttaagtgaataaattctatgtaattacaaccacaaggttggtgcatattttagaaataaatgcttgttttactatgagaggaaaactgcgaatggcacacgacctaaacaagggcatcctgtttgcttggatgaaaattccatccccatgtttactataccttccactctcattcaaacctagaacaggagaaaaatagttcgagtttaaaaacaaatccagtagagtttaggaaagtttgtctcgtataccacacctttaaaaggctattttgcaatgacaatattcttgtattgccctctctatttttccctccctattgtatacatgagcccagcaacttctagaatatactagcacatatgaaatttttgaatatctatttcatgtagggagattagaaagtcactttctgccacttgtgtagctctattatgcaaaaatcaagaggatgcagatcataaatcccattagggtggaactctggatgtggaaaagactatatagataattttaagagatttcccctcagctgaatcattgctataaagttaagcatggtttttaaaatataaatcaaataaatggtttctataaaggcacatacctttactgtaaactgaactccaacaaacttttgagtggacatttctcaaatacagcatctattgaaaacttcctctgaaaaaacatttcataaaaattgaagcttgccttacatattttcatactatgtggttttaatgaccgttgtattccactctatcaccataaataaatatgtgactttaaaagatatgttgtaaataaaattagctcgaaaatactaacactaaccaaacattaatcacagaatttaaggagactatcagagactaattcagaaaataaaaatattgtaaaattactaccatgaaagctctaagaaaagttcatgataatttcagtgatgctaaggctacagaccaaatataaacttagaaacaaaagtatttagtctaagacaaattaaatgtgtatatattaatttattttctctgtttgatgggcatagaagcccatcaatactctgaatttatattttattaatactctcacaatttactttcatatgtgacttactatgtaatataaaaaacaaaagagcttgaaaaactgagatcagagggcaacaataaaatattaatgctaatattatcttgaatttttatctatacatatttaaatgttgttatcctcactgaaatttgttactaatcagtgaaactttagtatttacctaaattagttcttcttataagtagctcaatctccataataggagatagactataatttgtactttagcataaatattcttctaaaatcattcaccgttttatattgtaattgactgaaacaatataaagtggcttaaaatcattggtatattataaaacctatgtcagataaaacatggcatctgtgaagtttgggaattataacccagaacagtgtataattcaaaacagatacctgaaattatcttgtacacatctcgctatctgctatatctcatcacataaaatgcatagtagatgcacaaagtagctgtccaacaaatacttatggaattaataaatgaaggaatgacaaaaatgcttttcctcaatgtgctaagtcaaatacatgtttccttttataaaaatttaactatatgttttagatttagttgaaaaaatctatactggaatttacataattacataatacatattttaaagtattattcccagtatttatgaacattcattaatgagaatggcttctacattaaaagatcagttagcctctgctatttttgataatgatttaaacttgttaattcttacctgtataatgcattctcctttacaaaatgctggtatggccacttgttttatgttatcctcacaacaattgtaggtatagatgtgataaataatatactcttcctattctgtttttctttttaacaaatgagaaaactgaggcctaaagctccagtgattcactcatgtttacacaaataactctaaactggcgctcagctcttgctaattctttgtctcctcttttgttttgtttttgtttcattttgtttccctaaaccataatgccatccaatattatttaaagtttgcctgcctgcttttgcaatggttcttagctttccacaatagcaagtgcatcaaagaagaaaaaggaaatgattatatggttattaatcaaactcagatatggctagtaccacctttataagtgaaacttatataacaatctcagtttatgtcagtctcttatcccagtgtttaaagttttaaggactgagctgggaatgtgaggaggcttttgcttttcattttgtactctactagttttaatttttcactatgtgcatacatctgcaccccaacctttaaagaattagtttcctgaaaaaaaaggaaaatgcaattcatcgtacaaataaaagcataatcccttttattaatttttagctaacaaacacataataccatcctattccaggtactgtttttaaatgacttgtatctaaatgtaatgttaacgcatactttcgatgtgcataaatatagccaagcagtcctaaattcagataaattatcttccatctactgtatataattatatagtatttcctaatttttataaaatatggtttgtgtgtatgtatactgttactcaaatgaggttttgttgtttttctctcctcaaggtcaaaaacaatatctcactctatcttttgtgtcttttgttttttgatttttttttttttttttttttttgtctgctttgaacagtttttaagaggaaaagaagaaaaggtgtttgggggttacataaaaaaagggagaaagagacccaaatctcctgtctcttttatcacctacaaactgtattgattttcactttcctttcctaaatccatgctttaaagacattgtccatctaagaaacatagagtcccaaagcacaagttttgatgtagtgagcacccattgattgtaccttgaagtggatgtaggtaaacagatgacagatagatcaggtagatatatagatatagatatagatagatttatcttgaattttcctagatcccattaatctgaatgtacaaataagtctcattagttctaatatttgtatttcactgcctcattgccctcacctgctgtagatgatctctgcctccagcaaactaatcctcatgcatttctggggagtccatatgggttttctcacttgcacttaggatcaagctggacaccaattggctaagtgccacggttactccactgggcatctccatgtcccttctctggataaacaccatcatctatgggcataaggagcactgctattcttccattgctgctccaccaggtacctgagctctcccactgctgtgccaggtggaatagttttccaccaggggccaccttagatattcctcgtcaggtgagtaccaggactgctttgctaggtagagctgtcccagtcgattctaatatgcccctctgctgttatatctgtatcactgttctgtattctgctagtaccaaagctgaatgagactatgttaaaagtagtggtggaaaaatgtctttcttccttgcctccctctttcttaagtgagtcctaaaagaatactgagtagattttggtatcttaaaggtttaacaaaacagatcttctttgttttactctaaatacaaatctgagtaaactagccaaggctctcagaatgatctctctcttctgagaaccagggcaccatacctggctccgatttctctcatggtgaattcttcaaaatgttttccagtgcatgggctttcgctgggttatctcccacgttgttcacaatgttcagagatatctgagttaacagcacacccagaggtgttccctctttccatgactgtcccccacaaccccacgccaagaatgccactccccagttctaatggcagtatgctgctggtagcctggccacctgtctcagtccatttagtgttcctataaaggaatcacccaagactgggtaatttataaagaaaagaggtttaattggctcacggttctggaggctgtacaggaagcatggcagcatctgattctgaggaggcctcagggagcttttactcatggtggaaggtgaaggggagcagatatatcatgatgagagaagaagcaagagagagagagagaggaggaagtgtcaggctctttttcaacagccagttcttgtgggagctaagagtgagaactcattcactcccatgagaatgatgccaagccactcatgagggatctgaccccaagatccaaacacctcctaaaaggctcagcctcaatgttggggatcaaattgcaacatgagatttggcagggccaaacaaaccctatccaaaccatagcaccacccaatttgccagatatacccaggcagatctaaatatatcttacactcacaatcaggtcctccttttatgagataccaaagatgttccattagggttctcagacaaacagaatggagaaagagagatttattgtaaggaattggctcacatgactgtgggagctgacaaatctaaaatctgaagtctgcagggcatgttagcaggctagatatccagggaagagttagtgttgtagtcttgggaccaaaatcttcagggcacgtattagtctgttctcacgctgctaatagagacatactcaagactgggtaatttataaaaaaggaggtttaattgactcactgttccacatggctgtggaggcctcataatcatggcagaagagcaagagatgtcttacatggcagcagacaatagagaatgagaaccaagcgaaaggggaaacctcttataaaatggtcagatcttatgagacttattcactaccacgagaacagtatgggggaaactgcctccatgattcaatcatctcccaccgggtccctcccacaacacgtgggaattatgggagctacaattcaagatgagatctgggcagggacacagccaaaccacatcagggcagatgagaggtttttgttcctcatgacacaaaatgtggtgtcttttccaacaccacttcttcaattctctgacactcactaggcatgctatagttcagctcagttctgacagtaactacctggagttagagtaagactccatagatttaagagcccagtcccacaagactaccttcccttcagaggccaggcacaagtattgagtccccactttagccacaattctctccagctgagctacacagtcttgggttcccacaaccccctcttcagggttgataatttgctagaatgactcacagaactcaagaaaatgctctacttactattgcagtttattttaaaggatgcatataaacagccagatgacaaacctcctcaaattctgtttaggggcttttaggaggtttcatgacataggcatgattgatcaaatcattagccattgatgattgactcaatttccagccactccccttctcccaagcggttgctgattgagtagtgaagctgaaagttccaagcttctaatcaaggtttggtctttctggggaacagcccttattttgaagtagtctaggggccgtctgacagtcacttaattagaacaaaagatgctactatcatctttatcactcagaaaattccaaggattttaagagttctgtgccagaaacctggtacaaagaccaaatatcttcttatatcactgcaggccagcagactggaaactcccatagaatttttatcatgcagtcttgaggcagaattctttcatctttgggaaatttcaatctttgctctaaaggctttcaactgatcggatgtggccaacccatactatgtagggtaatttacttaaagtcaactatctataaataaatgttaatcacatctaaataataactttatagcaacatttagattggtgtttgatcaaacaagtggataccatagcctggccaagttgtcacacaaaagtaaccatcacagatgtattattttatttaaaatcatcagtattatatgaattaattcagaaataaaaaaggtgttgtcatagtgtgaacacttataagtgtctttcccacagaaatgtcaacagactgtgatttgaaaattgctgttttaaaagagaaaagctcatcattctacagaaatgattcaaagatagacaatccattaaatatcttataatgggccaaatactactagttgttaatttacacttgcaacatcaaacactttaccagctttttaacatgcaactgttgcatatgatgcattgtgttttttgcaagtaggtatacagcataattctaataggatatttatttacaacctaaccttacaatttaaagtctgctactccattgtgctcatcctacccgctgtcttcttatattcaaagctattaaggagtacttgctcagcatatcactccaaattaaactgcaagacattttatgatgaattaaatgggtgacgctctcccagcctttgtaactactagagcaagtatccaagaagcagacaattttatcacaaaattctgattgccaagttgtttttattaaatagacatacagtagagaatttaatcttagaaagcatctaacataaacacagatttctcgttttatagatgaataaactaagatccaatgagggcaactatttttttccaagttcatgcaggcagctaacaccagaacaaagactaaacaaagctcttctaacttctccccccatttttatcatccattgcattcattactacaaaattactacaaaattattagcctggtctttaatggtggccccaaagaatggtttttagtattacttccttcacttctttcgtatgtcctgtgctccagctaaactgaactatgttgaactaagctaaacatttctccttaagcttgtactgcattttgctacagtctttttgccaactcttcccatccagaatgtcttcactctctatctccactgctttaaaacctaagcaattttcaatttaagttctatctcctttttgaagtattgtatattcttctagccagataaaattctaggaaaatattgtcatacttgactgcataaagatttaaattgtctatatagcaaaataaaaccattattgaaatgataaaacaagtgacaaactagaacaaaatactttatagcatacttatttaataaatatctattgatagcttgctaagtaataggcactatactaggtgctatatccaagtaatgttgacttattagctttcaattagaaaaagagaaacactattagatatgggtcaattagataaacaggcacatccaaaaagaaaaaaatatgtaaatatagtcacagagataataataataataataaatgagatgctacttaacatttttcaaatgtgtaaatattttttaaaattagatttttccatattgattagaagatggagaaaagagctctttcacataatgctgctgtgaatgaaaattggcaatttatatcataatgtgccacagttttgttctgtatggtctcaatcccccctgtaaatgtgtgctctacttttctctaccttgtcctgagctttagcctctggattctctttgggttctgccaacgtaagacacaataaagagaacaacagacaggagggaatgaggccgaagtgtttattcctcaggctctgtgcttgcaagggtccccaggctctgtgcttgcaagggttcagatgggcagtagctgttcctccattgaggggaggcccttcctacagtacagctgtctttccagctggatgtggtcctcagcctaaggcagcaatggcttggtctgtgtttagccactagctgcgttcttattcttgaatgtgccccttaagcctggcccaaatcctgtaaatagtccctgacatatttctcttcaataattccatttcagtgtgccatcttctcccttgtcaggaggaccccaaatgatccctctttgactgggaaattctacttctaagagtttatgcttaaggtgtaattaagaatgtacccaataatacagtaatccatattaaatgttataatagtagtaaaaatgacactagtgaagcacaaaagagaaattaatccaaactgaaagagtttgagaaggtttcttatagggtgtggcatttgatttgtgtcttaagggtagcatgagactatgccaaaaaagaaatgtgtatgtcttgccacccaaaagagatatcttggccattgaggatagagattcattactttcttatgctatataaggcgtagtatagggctaggttgaaatagtattaaaataatatttaaggattgattataggttttcattgagaaccattctcaggtgatactttactaagctgacaatagacttagcactgcctggcaaacagcaagtagcagtcagtgatatagccatgattattactgaattaacagcatcttaatcttcactacgatatttgaaagggaacactgattcataaacctactcttttcctgccacaggtagtcaggaacttattattcttattatgtctcattattaacttctgttgcctaacaagatattatatattgtatgtcacatgaatattttcttacaaagtattaattgattcctaatcttgttaaagaatatgatagtagcaaatatccaactaattctgagagaaaaacctccagttttgcaagaaagatttagccaagttatgcaactaagtttgttcaaataataactctataaagttatctcgattatctcctctttagtttatgaatcgaaagcattgatgaagatcaaaagctaactgatgcctccctaattctatatctatccttgtgcagaggcaaagtaggggagtcagtaggatgtttgtgtgtgtgcgtgtgtgtttttgtatgtgtgtgtagatggagacagagaaccatagcaagatagagagagaacacgagaggagactgagagagaaggaaagagggaggaagggatggatggatgaaacgaggggctttctctcattttatatcataaaagtaaccaagaaaaaaatcctgggttcaatattttataattattacaaatggggtattagagatgttcaggaagccagagtagaaggcagctagctaagaatgctgtcagcctaaggagtttttcatggacgcctttttattctaaccagccacagaagaaaagagggaaatgaagaagcatcatccttcactatcacaactgacaataagggttctcccttacctcccacccccgcccccactacacacacacacacacacaaagtagtgactgaaaaccctcagcaggctgggctcccctaccacatgccacctgctgcaaatgtgttggaggcaccaggtcctcctttcttttttgccagttttcttattgcagaaaggttttactattcaacaattaggagtgtccaaggtgttaggggtcataagatacatccttgttctcaaagcgcttataacactgtaactactgatgactggtataaggatgcttacaagagaaatttattaaaagggcaactcagtagagtacaaactacgcatatgttgaagagagtcaggagatgtttcatggataatgcaaacattgaacagggttttcatgaaagggagggatgtggatttctctgataaggtggaaaacataagcacaaatggaagaatttgttgagtttagtatgtggtttgtgttcagttttaaatataagtccttatcatagcaaagcgatttcttttctttttgtttttgttttttccttttttaaattattttactttaagttctagggtacatgtgcaaaacgtgcaggtttgttacatatgtatacatgtgccatgttggtgtgatgcacttgttaactcgtcatttacattaggtatatctcctaatgctatccctcccctccccgcccaccccccagcaggccctggtgtgtgatgttccccaccctgtgtccatgtgctctcattgttcagttcccacctatgagtgagaacatgcggtgtttggttttctgtccttgcaatagtttgcccagaatgatggtttccagcttcatccatgtccctgcaaaggacatgaactcatccttttttatggctacatagtattccatggtgtatatgtaccaaattttcttaatccagtctttcattgatggacgtttgggttggttccaagtctttgctattgtgaatagtgcggcaataaacatacgtatgcatgtgtctttatagcagcatgatttataatcctttgggtatatgcccagtaatgggatagctaggtcaagtggtatttctagttctagatccagacacatgaaaaaatgctcatcatcactggccatcagagaaatgcaaatcaaaaccacaatgagataccatctcacaccagttagcatggcgatcattaaaaagtcagaaaacagaaggtgctggagaggatgtggagaaataggaatgcttttacactgttggtgggactgtaaactagttcaaccattgtggaagacagtgtggcgattcctcaaagtgatttcaactctacagatcagtttgaaagcacaggactggatctcagtgatggttaattgctcatctggccaaagaaaagcatgttgcaaggttaaggctcctatgaggaaaaggagagcaaggatgttcaggctgaataaagcccctgtttttattaattataaggtcagaatctggttctcctggaatcaaaatgctgagcaagcaattgtggagcaagggctacacaatggcagagatgaatgcaacctgatattccacatgcattctggcgcagctcattgcttttcaggcatctacgagaaacatatcaccccttaggtttgctgccgaagatgtgttctcactgaaccataacctagcagaggttctcaggttggaataccaaatagcaagatgatgtggtcagtgctacctatattgctctaaaatttttaaacatctaattgatgatttgtgggaaggttgcacagagagaagaaaggaaaaccaggaaaaagctgtgtttttaatttatgaaatattaagaagttttcggaagaagacccagacaatatgtattagatcataaagaagcaaaaaagtgctatgtaattttctgatggtagaaacaaataagaagatataaattcctcagtttacaccatgagtttaaagaaaatcatcacctacttactggttcattttgtaaattgagatcaatgaaattctctgaacaacagcatgaaatcaatcgtaaaatagcacataattcatggccagtattgtaaattatagtttgcttgacagtaatcggtaaggtttccatgcactgggatgcatttccttgtaacacgtctaaggataatgcctgtggatccatttctaatgcatattagagtgatctgtttttccctgtccacaactccctgtgtttgatcttatgcaaatgatgcaatcaagcaaatggaaaacaagatgttgttgctcaggggctcttacaaacagtggccttatgttttcagggtttccccaccctccatttacccaactcagatttgtgtacatacctgcaattgtttgaatccgttgatccatttgtgttgcccttgaagtgcctaatcacatctatagagacatattaccaaatcagttgcagttaagctaggaggagagttgtcattactttcctctttgctttaaatttcaaattggtggctttgtttatggcttcactctcaaagaatttatcagcctcacttccctgtaaccaatctttttttcatttctttttgttaactgtttttaaaaactctctcattccattcatacattttacacatgactactccttccccccacgcccaacctgatgcctcctcctcttctccatttttttccctttccctcatcatttcctcctgttttaccaagaatttcccaatcagatcaccgtgcaactttctctgccacatgtcaaattaggttctcttctctctctctctctcttttttcatgctttattattcaaagaacactagtaacatttcatcttcttatggaaatacattgagaataatccactttgggatggacagtacaggcataaaaacaacttggaactcaaaaaagctatttaatcacaatggttttctttgtattatgtttacagttttcagatttttaaaaccaaaagaaaatacccaatttctattgtagtgactttcatgtgagtccgtgtgaagagaccaccaaacaggctttgtgtgagcaataaagctatttatttcacctgggtgcaggtgggctgagtccgaaaagagagtcagcgaagggagataggggtggggctgttttataggatttgggtaggtaaaggaaaattacagtcaaaggggggttgttctctggaggccagagtgggggtcacaaggtactcagtgggggagcttttgagccaggatgagccaggagaaggaatttcacaagacaatgtcatcagttaaggcaggaacaggccattttcacttctttcgtggtggaatgtcagcagttaaggcaggaaccggccatctggatgtgtacgtgcaggtcacaggggatatgatggcttagcttgggctcagaggcctgacattcctgtcttcttatattaataagaaaaataaaatgaaatagtggtaaagtgttgggacagcgaaaattttgggggatggtatggagagataatgggcgatgtttctcagggctgcttcgagcgggattaggggcggcgtgggaacctagagtgggagagattaagctgaagggaggtcttgtggtaaggggtgatattgtggggttgttagaagaaacatttgtcatttagaattattggtgatggcctggatacagttttgtatgaattaaaaactaaatggaataagagaaggagaaaaacaggtataaaaggtctaagtattgggacgactcaggacatctgattagagagtgcctaaggagattcagcatagtcctgccagcaaagattatttatttacttcaagagttaagagtggcagtttggggatagcatgaggagatgtcagctgtgatggcttggagaaacagtgtaaactggcagtgtaaacaagagcaggacatgtatgagtagttgagaacggtgaataggagtatgactagacagaagatagtagggatgacaagtttttttggggcacagtctaagttggtctggtgtctggaatgagactggggcctaataaaaaggagcgtctatacaggagctcaaatgggctgtactttgtagcattccgaggacaggcctgacttctgagaagggaaagtggtaaaagtattgtccagtcctttttaagttggcggctgagcttggtgaggtgtgtttttaaaagacctttagtccgttctacttttcctgaagacggaggaccgtaagggatataaaggtttcactgaatactaagagcctgaaaaactgcttggctgatttggctaataaaggctggtctgttatcagactgtatagaggtgagaaggctaaactgaggaattatgtctgacagaagggaagaaatgactgcggtggccttctcagaccctgtaggaaaggcctgtacttatccagtgaaagtgtctacctagactaagaggtattttagttatctgactaggggcatgttgagtaaagctaatttgccagtcctgggtgggggcaaatccttgagcttgatgtgtagggaagggcctgaataatccctgaggagtagtagaatagcagatggaacactgagaagttatttccttgaggatagatttccatgatgtaaagaaaatgagaggttctaagaggtgggctagtggcttgtactgtagcatagcctgcctttgctggtgtgtgatgattaggcctggtggaactgccatcaataaatcaagcgtgggcgcctgtagtcccagctactggggaggctgaggcaggagaatggcgtgaacccgggaagcggagcttgcagtgagccgagattgcgccactgcagtccgcagtccggcctgggcgacagagcgagactccgtctcaaaaaaaaaaaaaaaaaaaaaaaaaatcaagcgtgatcaggctgaggaacaggaaagaaggaaatatggggaaatggggtgaatgtcaggtggatcagagagatacagtcttgggtgtcaggtgtggtatcaggaataatgtgggaggctggattgaagtccgggccaggaacaatggtaattgtgggacttaacaaagagtgagtacagctgaaggagccgtggagcagaaagtatatgcgtcaggtatgaggaagaaaatagattttggaaattatgagaaatgtagagagtaagttgagcatagtttgtgattttgagggcctctaaagtattagggctgcagcagccgctgcacggagacatgatggctaggctaaaacagtaaggtcaagttgtttggacagaaaggctacagggtgtggtcctggctcttgtgtaagaattctgaccgcactaaccatgcctatgaaggaaaggaattgttgttttgtaagggattgaggtttgggagattaatcagacacgatcagcagggagagcacatgtgtttttatgagaattatgctgagataggtaacagatgaggatgaaatttgggcttgattgaagtaatgggggctatctgtgaagctttgaagtacagcccaggtaatttgctgagcctaatgggtgtcagggtcagtccaagtgaaagcaaagagaggctgggatgacgggtgcaaaggaatagtaaagaaagcatatttgagatccagaacagaataatggattgtggagggaggtattgaggataggagagtatacgggtttggcaccatggggtggataggcaaaacaatttggttgataaggcatagatcctgaactaacttgtaaggcttgtctggttttaggacaggtaaaatgggggaattgtaaggagagtttataggctttaaaaggccatgctgtagcaggcgggtgataacaggctttaatcctttcaaagcatgctgtgaggtgggatattggcattgagaggggtaagggtgattaggttttaatgagatgttaaggggcgcatgatccgtcgccaaggagggagtagaggtatcttatacttgtgggttaaggtcgggggatacaagaggaggacgcaaaggaggctttggattgggaagaggggcagcaatgagatgtagctgtagtccaggaatagtcagggaagcagataatttagttaaagtgtctcagcctaataagggaactgggcaggtggggataactaaaaaggagtgcttaaaagagtattgtctatgttggcaccagagttggagagttttaagaggtttagaagcctggccgtcaatacctgcaacagttatggaggcaagggaaacaggcccttgaaaagaaggtgatgtggagtgagtagcctccgtattgattaagaaggggatggacttaccctccactgtgagagttacctaaagctcggcatccgtgatggtctagggggcttccaaggcgatcgggcagtgtcagtcttcagccactaagccgagaaggggtcagtcagagaaccttgggccagagttccaggggctctgggagtggctgccaggtgagctgaacagtccgatttccagtggggtccggcacagatgggacgtggcttaggaggaatcctgggctgcaggaattccctggcctggtggccagatttctggcacttgtagcaagctcctggaggaggaggttctggaggaaggcctggccgctgcagttcaggcatttggaagttcttgtgtgctggagatgtggctggggttcgtctcacagtggaggcaaggaattgcaacttttttctattattgtacaccttgaaggcgaggttaattaaatcctgttgtggggtttgagggccagaatttaatttttggagttttatttaatgtcgggagcagattgggtaataaaatgtatattgagtataagacagccttttgactttttagggtctagggctgtaaagcttctcagggttgatgccgagcgaccatgaactgggctggatttttatatttgatgaaaaacagcctaaacgctatctgatttgggataaagaaaaaggagcattaaccttgactatgcctttagctctagccacctttttaagagtaaattgctggtcaggttggggagggctagtcatggaacgaaactgtaagccggactgggtgtaaggaggggaggtgataaaaggattatagggtggaggagcggaggctgaggaagaattgggacctagcttggcctggcgaggagcagtctggggaggaggggagaggtcagatgggtctgtagaaaaggaaggttagaaagactcagccacgcttggacgcttggggttgagactgaggggacaggtgggagggaaagaaggaagatttgggacgagttgcactgggcacagagactaggaagggaccgatgtgtaaaagaatgcctagacgtcaggcacctcagaccgtttgcctattttatgacaagaattatttagatcttgcaggatgaaaaaattgaaagtgctgttttctggctatttggaactactgttgagtttgtattgtggtcaagcggtattgcagaagaaaataagacacttagattttaggtcaagtgagagttgaagaggttttaagttcttaaaaacacaggctaagggagaagaaggaatggagggtggaaggttgcccatagtgaaggaagcaagcccagagaaaagagagagtagagacacggagggaaggggttcaggggttcttaccctccagaaaagtgggaaagaggttggggcatggaaataagggattggggcacagagatataagaggtcagggtgtggaaataagggattggggtgcagagataagaggtcggggcacagaaataaggtattggggcacagagatacgaggttgggatatttgcccctcccccagaaaagtgggacttgctgctaagggtgaaggagaagaggttgggggtttcttgccccccagaaaggcagagaaggggtgaataatcagagaggcgtccctgcaatgattaaacaccaagggaaggctccttcccagtccgtgactggcgccagagttttgggtccacggatgaaacatgtctcctttgtctttaccagaaaatgaaaggaattgaaattaagagaagggagagattgaagagtggaaaggagaaagtggttgagggatagtgagaaaggttggagaagagagtaagaagaggttgcttacccaatttaaaattggtgagatgtcccttgggctggtgggtctgaggacctgaggtcgtaggtggatctttttcacagagcaaagaacaggaggacaggggattgatctcccaagggaggtcccccgatccgagtcacggcaccaaatttcatgtgcgtccatgtgaagagaccaccaaacaggctttgtgtgagcaacatggctgtttatttcacctgggtgcaagtgggctgagtccgaaaagagagtcagcgaagggagataggggtggggccgttttataggatttgggtaggtaaaggaaaattacagtcaaaggggggttgttctctggaggccagagtgggggtcacaaggtactcagtgggggagcttttgagccaggatgagccaggagaaggaatttcacaagacaatgtcatcagttaaggcaggaacaggccattttcacttctttcatggtggaatgtcagcagttaaggcaggaaccggccatctggatgtgtacgtgcaggtcacaggggatatgatggcttagcttgggctcagaggcctgacagtgacgacatagcagtcagatttcccaaaccagaaatctgacctaacaaactacttttttggtgtgaattagcttatcttaaaaacttagaaaacatttcaattgtacctaggttctgaaaatcttgtctgtgtggttatgataagcataggtgaggtgctggttgagtatgtggcattcataaatttcagtcttcaagacatatatgtatgtctctatctctgtgtacagttatgattttatttctataattcagtttaatatctgactttactcccatgcaacttagtagtaagtaaatcacagtcactttgggggtccccccacctctactaattatgtaaaagcttctggggtcttacctagttccttagcatctggagtgtggccacccaggatgctttctttctctgtgcaaagggataactattgagacaacccttccacattcagtgggtatcctcagtgcttctacatcacacttgggcaactgaaatctttacaaggttttctgtggccctgcctgaatacagacaccaaagtctttctttttgctctggtcttgcccccgacctgggactctaccttgaaaacaggggtcagggcccctccttcagagagcttgcacatttctacttccttttatccttattccatcaggcagggaattctgaattagggaagtggaagactccatacttcctatttctcccaacattatatctgagggaacagagtcttccttctctgttccctcagtcactctgtccagaagatttttttgtttttttttctgcctcctgaccagtcacattctgttttacagagaaatctattttatagttaaattctgattttataatttaattgagtgtactagttcgttttcatgctgctgataaagacatacccgagactgtgtaatttgtaaagaaaaagaggtttaatggacttacagttgcatgtggctggggaggcctcacaatcatggcagaaggcaaaaggcacatcttacatggtagcacacaagacagaaatgagagccaagggaaaggggaaaccccttatggaaccattagatctcatgagacgtattcactaccatgagaacagaagggggaaactgcccccatgattcaattatctcccaccgggtccctcccacaacatgtgggaattatgggaactacaattcaagatgagatttaggtggggacatagccaaaccatatcactgagaagcatttagataaaaattaaatgcagaaaacatatagggtcggtagcagggaaggacggaagaaataaaataggttagtatgacaatcagattgatctcagtacccattgaacaaatcctgagcattgtaggagtttagaagaggaagctctaagggcttcaatgtaaacccttacttggttcctcaagagaattgtccaaactatgaaaggagaagaaggaaaaacaaatcaatataatgaagagagtcacaaaggaacaacataattatggctgaaaagttccaaaagcccagttcaaactggaaaacctgaaattatactagactctttcagtgtgttcagtgacatctctcggaaacatcttagagatatgagaagtattagagacataagatgataagatttatccagaagtgggaactgggatagccatatagaagaggactggggatgtgaagaaccctatgtgacccagggagtatggctttgtaatggatgatcaaatttcattgatgagggaaatgaaactattgaaaatatctgggaataagaaggtaccaagagactggacattgtgtagcggcataggagtgattgcattgatgtgacaagtggaagaggtgggaagtaaccagtttgtggtcagagagtgcaggatttagatttagaatcttggaaatcattctgaagattatgaagtagtaggtgtaactatgctgaatgttgaataaatgaagtagaggtgaagggcattgcatttgaggaagttaaagtaaagccagattcagagatgagtcattattgaggatgttagagttgccaaaaagggattatgattgaaaagaaaactgagccaatgctgaagtcatagaggagagaagcagtgtgaccggagatgtgatgggggcatgcgttaactaggttggggcatatcttcttttaaataatggattgatattaactatggctattttttctccatctatgatataaatatatatcacaaaaaatttgaaaaatatatgtaacaaaaattaaatcctctatatgcactcactcagaaaaacattgttaacatttggtttaccactatctcctgttttgtttttattttttttattgtttctttcttttacaatgaagcactggtactttaaaattatgttttggcattcagacaggtacagctttgcctttttctcgtatttaatggtaaatctcctttgtcttacaactatagacccctacattggcccaacaattatattcattatattcttggagactttaaaacatgtttagacattactatatttctgagaaaaaaaaatggcagcctgggtagagggcatggggatatccttctggtcttgctcattcatttacaacaagtaaaattatgcgagttagtcatcacaccattcctggagatatcctgctgaacatgataaaaaatatttatctgaactcaagaagtttacattctcctgggaaggatataatatcaagatataaatgaaaaggcaatattgaacttgttttagtaattatgatatggaactaaacaaggtgatataacaagaacctggggatgatggtggccatattgttcaattatcaagaaagaccactcatagaaggatgaagctgaagcataagaaagagcaatccaagtacaaagagagagaaaatagatttcagtcagaaggagcagcacctgcaaaggcccagaagtgtgaacttgttgtgttagaagaacagaataatgtctagtctagtgtatgaaaaaaatagggagaatgttacatcaaataggatctcattgaccattattagatttcgttctaagagcagaagaagggtactacagggtgttactctgaagaatcaaaagatcactcatggtaaatggtcttgttttcttcattgggaaaattgaagtagttagaggataatgcccatagactctgctaccatctacccacctaccagtattggcacccacatagtctgcatcccctcccattactatagattgtctctgttccaagttcaactctttcacttttgaactagattctcctctttcacatattcaaggacaaaactccagcaatttttttctctttcatccacttcatagttttcccttcactagtgggtcatcccatcacatacaacaaatttttctctcatttaaattactttaaaaatcttctcttgattctacttaccttttatctattgctacatttatctgttctcctttaccacaaaactttttgaaaatgttcttttattcactgtttctaattcctcttctatttccttataagcccacttaagtcaggctttagtgctgacaagttcactgaaacttcaattgtgcaattactgatgactgccatattgttatacccgatggccgatttttaattctcatcttatttcacctttaactcttaaaaattacttcctttgactttcaagacaccataatctcaatgttttcctcataccttactggtcactctctgtctccttggttgatttctcctttactcattggcctcatatgttggtatcccagggttttctcttttatatctattctcactccgtttgcactcctagccatctatatgatgatgacttaccaaattatatatctcaagccatgaactcttcctgtaattccaaacttctgttcaaatatcctgacaatctcctcttggttatctaactaacatagcaaatgtctaattgacattcattatatgaattcttatcttcccctccatgccttcctcaaccaataaaatggttactttatccttccctttgctcaggtcaaaagccttggagtcaactctgggtcttctctttcatactctacctacaatgcactgggaaatcctgttagctttgcctttaaaacatattcagaatttaaccatttcttacttgattattactggcccccacttacttgatattacaaatagcctcttcagtgagatgtattcttatgctcttgctcactaccatctatacgtctggcagccaggatgatactcatgaagtccatgtttgattgcatgacagctctgttcaaaatccttagtgtcttcctaagtagaacctcttagattaaaaaccaaaattcttacaaagacctacaaggcctgcatgaactgacccctcattaaatctctaatatcatctctaacttacttcttcctaatttgttctgctccagccacctcagcctccctgctagtcctcaagagtgtcaggcatgtccctccttccacagctttgctctgcttgttccctctcttggaatggtccaacccaaaaattcccataacttttacactcatccccacttcaggtctttgctcaaaatgccaccttcccaatgaggcctctgctgactcttaactattaaaattacccagaacttctaattctccttcctctgttctgtgttttctgcagcagttttcatgtaatgcagcatgaacatcttaaactccgttacacattcactttaaagacatgctatcttctaaaatgcaacacctttcttacccataaacttcataataccttggataatctagaggcaaaccctaactagggatggaggatttgacaagctcaactaaactatttctatttcaatcctggctcactagccattctaaccctctcaagcaacatgagaggtatacttgttctaagtatactcacttcccatcctgaccgccccctgccccagtcccagttgttatagaaacggacacttcccactccatggaagaatccgggcacggataacaaatcctgaactaattgcttcaggaagctccttccatctgaggcggatattctgggtgggtttagggcttaggtgatcatagtcaccttcaacgcatgcagtttataggggaaaggtgagtggggcactctgtgataagcagacactgcgatatgtgataatatgatgatgcattcttgagatacctaagtcctaccttgagatacctaagttccagatatgcaagtctgtaccatggaaacatacgcaagcaagcatcgggcctttttgaatggagtaacttcttcaccacctacaagttgggtagctaaatccccaccccagcaaagtagaatgtaagaaagaaggaaaacctatcccactccaaagagttcactggccaaagaattttgtagcatccaatctcggttgcggctgaccaagacaatctgatatggctattatatatttcaaggtcacgtggatttggccacatggaatataatttctggctggagcatgttctttcagaaagttggatgtgttctcagttgaaacactataggttttctccaattgcactgaattacccatcaggaattcctctaagcttggtgacctccttggttttgctcctgcaacgggacttagagtcaaatccccagcttctctttttcagggaggacaaggaattcagacagatgagaacaatgagagagagaaaggtcaccagagagcgaagatgaagagaacagaggaatggcagatacaatatgttagcatataaacacattataattttggccaagattggccctgtcggtaggagtttttctttgcataaagttttctctcagtaaataatagtctactctctcggtagcatctgaggccactgctgtaatgattttttaacttcataagtttcctagaacgttggtccaaatgaaggcaccccagttatgtctcagtcgtgtacctatagtgcgactgttgctgccatctctcagcagtccctggcaatgccacactgcttcaccatcagcttcaaagtgtccttgaagtatatattctgactacattgaatgggagtgccccatctcaacttgcaaccattggattcctgtaggatagaatttgtaaagaaaacaaggtttaatcaaaagcattaagagtctcttcttgttgacaactttttgttctaaggtaaccatatttactgtaaattatttttttaatctctcttctagtgacctacatgtttaaccaattgattgtactttgcatgaaaatcaaagtgttctttccccagtttacttttgttatcagtgcaatgcaaaatctgtttgcctgaattaggttgcatttcattaatctcttcaatatgaaattgtggtggctcatggttaatgagatttaagaatctgtgttacttaaattgtgactaacttattttaaaagtatgtcagaaaataatgattgtttctagtagtgttaaagtattaatgattagtaagtcttggtacacctgactgaactttggttagattaccaagtgtaatgaagtgttcaggatatttcagaattgagttagtatattacagattagtttaatctaatacaagagaatgtggtatctattagaaagacagacaatataaaataccagggaagttcaggggagggagagattctttcagcctagggcactaccctagtctcatggtcatctttcagacctagctcgtttcattcattaattattcattcattcaaacacacatattcaaaacctacaatgtgccaggtattgtgctacatactaaggatgcaaaatgaatatattaccattcctgctcttaaggtatttagtgtatcatatagtcatgacacagtgtttttaagtgttaagctaaaagtatgtacaaagagaaagagaagaggctaatagctccatcttgtgctggggtgacagcaaggagtgttagggacatcacaaggaagaaacaggcatctgcactgcacctcgacaatttgaaggtcaaataatagtcaggtggtggacaggagaagaatggaatctgacaaacggaattacaagctcaaagtcattgttacaagctatgtattggcatttcaaaggcaactcctgttgtcttcaaatatgctttaaaataatttaaacatctcatttatttttaaacagagccattgaactaagactaaacttagcaaatgatttacctggtcacagacgttcaagaaaacagtaaaactgttaaaatgaaaaagtcaaaacaagagtttgattgacacttgtctatttaaacataaccaaagtatatttaagggatgaagcatcctatatgttattgctattgatttttatggctatttattcatattttaagccttatcttaacaattctctgagataggactatagtggaggagtgaaatctcctcaataagaagtataatgctgagtaaattcttgtttctccctatcccctagatttagcagtatttacaccccaccagtttctactaagtgcatgcacacatgtgggctgtacaaacagttcctgggtcctactgtacacagcacagctgccaccagaacacgtggattccccagttctgactgtcctggattctagaactatacacatacagtaagtagaaatgttgtctctctcacatgctggttcatgcaagaatctcagtgagttcaatcaggggaggagcttgtgacataaaattaattttattgtgattaaatgcatagaagtgattagttcagtggatctgggaacctttgattatcacttgccagcctaatttccattttgtctttatgcaatcaggctgagctacataggtacacagattccatgcaaacttcaataaacaaaaaactgaccactttcatgactgccttgaatattttatgtttggggcattatttgtaataatttggaattagaaagtatgtatatctttttgagtatagtccaggaccttcttattcccttattacctgcagttgatgtcagaaaggaagtttcacatataggcatgttctgatgatttctggtattactgattcttgtccatttcctgatacctgaggtataaggtgtactattgtgctgagctaaaatctaataggtctctcttatcaagagttaatacttgttcatatttatctcttctggactcagttttcttatctgtaaaataagagtttagactaaatgaattctgacatttattcaagccgaaaaatattatgattcagatctcattgttccatgtctaaattctcctgttggcttcattgtgcccctaagccaagccacgttacttagccaaaaagatttcccacgactcaggtgtttctcagcttaacaatttcctgtctgttctatgacttgcccttctcatttccactgctaagttgtaaccctcatctgaaatgccctctgttcttccttctacctatccaaatccaatccatctgttaagaataaaatcttatgtatctaagtagtgtgtcacttcattcaagaagtcctgcctgattttttcagcccttccagtcatcaatttcactgttttctctaattacatattaaccctgtgttggattcctggattttccaggacaattatattattccctcttttccccatatctaagttctcagaagttctgcttctgaagtttttgttctacagcttaaattcaaaataaatactcgcttatacatttttgtattgttagctaattaaaattacaggtaaccagatggcaggagccatatcacatttcctttttgcccctcagaataggcattggataactacttcagtgttttattttaaatgaatcaattttgagatttatgttttttaaaaaagtgtcacaaatccaagttcaaatgtgtcctttgaaaatcctgtatattttagttttgacttgaatgaatgataataatgtattttaccattcccaggtggaaacaaccaagaaaaataagtgggattctggaacgctatgtattatatatgtcaaaccatacacatgattttacaatttggagtgtcatctataacagtacagaacttttccaggatcatatgctacaatacgttttacctggtaataaatatctcatcaagctgggagtaagtttatttccatcactttctctgtccccattccttccacttcttctccccttcccgtggtccatcttttctttctctctcacttaaaaaaaaaaaagtcaaaatcttcatgtattgctgtttatactgaaaactctcttcccatcctaaatgtgaattctggtgatctaatacctacacatttattttatattatgcaaatgatagaataacaccctgagtcagtagattttcccaagtcaaagttgggattatcaagattttcaaaattacttgtagaacatcataattgttaagaactttttctaaagtgctaggattcataaggttatttccctgtggcatttgtattcatttaaaaaacaatgcacagtatgaaaatttagatcttatatttttaaatggaagtttaaatgaccgtcaaatattcttgattgttattacattctggtttatattatgctcctatctcagaagaacagtcacttaataaaaccccagaatcaacatagtttagaggttcccttagacaaacaatagcattttttaaatgcaaaaatagcacttttacacaaaggtcttttaaaagaccttgatattactgtggaatttatactcagtaattccttttgttttttgatgaaatataatcttttttaagtttaatagcacgtctgaaaataactgaatataaacatgagattgtccctatttgttttaaacacactcttcattttatagcaatacctatataaggatatttgctttgataaatgccatagaaaatattctgctcttgattatgaataaatttacatttatgtagacactgtgtatgcattcattttacttaacatgctcttgaatgctctaaatattataccatgagaaaataaactacactcaactattgctaactgtctgacttaacaccacaaaacaagggcaatcagacagtggttaaaaaaatactgttcaaaactgactccatgtgcctaggtgttctgcacagcagtttatgaaacagcactttggttatgtacagttttattacccattaagtaagaaatatactaacttgattttcaaatgctaacacagaaatacaaactattttcaaaataatggtagtatcaaaattaggaagagtcttaattttttggaagcaaccaaaactaaaccaaaaattgtgctcttggttgtttatcagaagtaggcaaatgacatagaacagattctcttcctagggccgtttttaggatgtgctgtgcagtcaatcaattcatatcaatctcctagattttataaatctataataccttgaaaaatacatactagtagattaggagtcctctgccctgagtattaattcagattttactacaaactgtgtgacctaaggcaaattcacttaacctcactgagttttattttcttcaagtctaaaattagaacattgaactaaatgatgtttaatgtctctgagccataaaattctatgatgctaaaaaaagtaatcccaaacactattctatggagtcaaatgctatctgtcagccgctgaatagtgttgatgcaagatgttataaagatgtgaaaatccttgccttaactcttggtagggaaataaacttgctcacattattttcaagttcactatatttattagggcagaaaataatatattttcagggaggattcaactaacagggtttttacttaactctgttaagcagtaaattaaatgaaccagaacattttaggttcatcctggttaattgagggattattgtatatttcacagtttcaatataataactggctttcaaggtcattagattagtagatcgagagcaggttctcagcaaagtggagttgcctttatagatcattttagcatgtcgactaagagctggaaaacaaaacataaagataacaaagcctttaagcagcatttggaatagaggaagctacacggggatttgaaccactatgatttaccctaggcttggagcaggtatgttacttcatgtaacgtcatttagttttcacatttgactggattataaactgctgaaacataaggactgaatctttcaaaatttgatctgcagtttcaagcacagggcctattggaaatgggaagctgagcaaacaattcctgaatgaatgatcaccaaggacatcatttcataaaggttctaagacttttgatatgaattaaataatttgcttggaaacactggaattaggaatggtgtggttccaaaacatactctttccactgcaaaaaaaaaaaaaaaaaaaaaaaaaaaaaaaaaaacataatatgttgctactctcaacaaaggctattttgaaatgtgataaaatgtgatagctcctaataaagaagacaatatgttaaaaataaaataaagaagctattaatacagacagctatcaagacaggtgttgcttgataattttcataccactgctagccatttgtaacttgatgaattctaagtattatatattcctgaaagattcctggaagtggcttcactttttaagtaattatggatcaagtggcctttttctttttcttcgtgctttaaaatatgttgcactcttaacatccccaatccctgtggacctgaaaacttactggaaaagagaatgctagttttggtccgggcacactggcttacatctgtagtctcagcactttgggaggcccaggtgggcagaccagttgaggccaggagttcaagaccagcctggccaacatggcgaaaacccatctctacttaaaatacaaagaatagccgggtgtggtgctgcaagcatataatcccagctactcgggaggctgaggtacgataatcccttgaacccgagaggcagaggttgcagtgatctgagatctgccactgcactccagcctgggcaatacagcaagactccatctcaacaacaacaaaaaaagagaatgctagttttggattgtcttaatagtcatgatttcaaaaataattgataaaattttattatttatgcattttattgtaccaaaattgaatcccttatttggccagatgttactcatcatttcaaggcagagttatgcctttatgaatttttcaaaatggctgtaactgagaaaagctataggcgatggttaaaacaacttattttaatggctctcaggctttcaaagaccttgctatttcataaaggcatttttaatcaaccccactattttgtttagtttttccagaccagaattttaatcagcattcagctgtattgaatgtagtggcctctggtgcgggcaggtcaaacaagatactgattggttcaatttcatttagatgatgtcagattagaccaattggaagcagctttaagaacatttattttcccatcaaaggaactaagataatgtcctgcttacttaggaccctctaaatgcatccaaaaagaatgtgggcaaaacaaaataaaataatttgcaggtaattctgttatttcagcagcctctttataaataatttcatttacaagaaaaatgctttcataaatgccttacattcttaagagatttctttgtcaagttactggtttatggatctcagatgacatagtagatgaaacagtccttctaaaccaaaggatgcttttacttatcctagaagacatcataaaatcctcaaagtaaattttaattcacactgtgttttaaaaatatatacttatatgttgtatagtatagaatttatttggggagagttagcaggggaaatattttagtatacaaataagaaaaaaatagtgacaagtagactatcagaattaaatcccagtgtgttacaagtttaacaataagaagctgcaacatttttcccttctaaggaaaaaaaatctgaaaaatgcaaatggatggattttttttctccctgagaagtgggaaaaatttgtctttgaccatttttcctttgataactcagctgtctcatatggcctcttttcctgccatattttctggtggacttttagcacatttgaaatgtctggggtcttcaactttttttctattttaatcgttgggcaattattttttgagctcacagtgacctgtcctaaagctttgagtcagagtttggccacatttgcaaagattccattctctagaggagtatggtttttttcttgcacagaaaggcacatgccacagctgagaattagaggaaacccacagaggttaattaggtacccaatcttaatgcaattttcatgctcaggccacaatttaacccatctgaaagttgcttaattaagctggtaagaaattatcctgaagacatgggctattgctatagtcttgtaatagcaagtgagattaatttccatgtttgttgaccataaactgttgtttatgcttataatgaagaatttgcaactagttgcaacaactttgcaaatagtagtgtactcccatatttaaaaaaaaaatctaaaaatcagtcagcttccttctgtctttggggaaaagaatatcgactactttaagaatcacaaaatcactcactcagtatcaaactgaaaaatcagagagacgcctaaagaaagagatgctttaattttttatcttagtaatatctgtcttacacaaaaatgagctaaatatctctgcttttttacattgtcttatgattttgctttattttctttttgattttggtaaaatttagtgccttttgaaagatttttaaactttgttgtatcaattgaaattgtaacttgaagagatactgaaccaagcttaagtatagttttcaaatatcattgttatataaggatataattactaatatttgctagcaaatatgggctgaaaaccccttaatgtatttatcaatttcctggagaagtgcttgtccagtaagtttaaaacattatttgcagtttattatgaaattgcacacggaagtttctgtaacattcatgttaccatttctgacattagtgatacttaattagggaacagagagttctgtgatcatgttaaatttgtcaaacatgttttaatgaagcctatctactctgacacataagtaaattatgtgatcctttaagccattaaacattcactcaaaaattgctttgtatttgttgttttatgagaaacattgttttatttaattttatttggtgttatgctataaacatattggtcacactgtagaaataaaaggcaattgtatttgctgcacatcttttcttccctagaagtcagttgttttgtcttaaagtagtcttcatcctctagtactttacttatgttatgtgtacacatgctgtgtgtgtgtgtgtgtgtgtgtgtgtgtgtttaattcactctgggaacctttgtgcaaggctaacttcagcagggctgtttatccagtcaatatatgccctacatctctaggctctgacttaagatgcttccttaattcatacattcataccatctcagttattctctaactattggggatggctatcttatgtcttaaaaagcaaattaaataaatgttaaatcttaacactgaaatgaatttattttggggaagtaaaggtagcactatataacaaaatctgaaactcttattatgaattctctttcctcaatgttcatgaaaacttttgggaccaagagtgaaatgagcatttttgcatctctgtttaggcttgcacaggtggtgggtgcacagtgagtgaggccagtgaggccctaactgacgaggacatacccgaaggcgtgccagcccccaaagcccactcatattcacctgactcctttaatgtctcctggactgagcctgaatatccgaatggtaagtgaactcttttagcctcaagttaaaaagatgattagcaaaggtaaattaatattctaaatggcagcttatatgtggtgcttaatttttaatgatcattttagcacataaaatacctaagatagtatcattgtctctagttggggagattgtggtttttaggctaacacacaattttggtggctcaaaagtgctcccttttgatagtttttgtgtactgcatctcattgtttaatatgctccaggagaggtgaagagagcaaacggggaggattcccaaagaatgccgtagtgagagtgacattgtattttcaatgactttctgtttttaaaagccattagttcttccttggcgaaggagagaggtggaaagttcatgtacatattgtgtcaaaacgcttttgatttaataagtttatcttaaaagaggccacttggaactctgtattttttaatatactatttataaatatttcaacatgctgtttttaaacaatgcatagattaaacatacatatatttatacatatttagctggaggcaagttttgtgcatttctaagcaatatatatgtttttgtacagtttagtgaattaagctagtcagttacgtttcactaaaataaaatctcattatgaagaatttgtaatagttttgggtagaaattgctttattcatttagtggaaatatctttaaggttcatataacatagtaccattgtttcacactgatggaagcttacttgacattaaatttcattcctctttgagacaaatatcaagaagacttttaatatagaaactcttttaagaaactcattactgaaaattgaaatgggctcttttagcacagccaaaaagaatgaaagaaaaaagttacagttttattagtttgtcttatgtttactatgatattaattattccagccatctcattttaattaaacttttggcaaatgcactagatatatttgaggtaatggagagaattctaataatcagagtgaattattatctctgctattgaagttattcctgtactattacaaattttccaagaaaaaataaatggatgcctatttgataccatattaagcaatcaacaatcttgttatgcttcttacttcacaaagtaccctagttcatagatgacaatgaaaatgttaatgatttatttcaattggattgctgtgaaatgctgttacatgatttgcatagtagagcacttcccttcatcccaattggttaatacaactagaactacaattgctctcagaatcttcagctgttcagggaaacattttccacattacaaagctctttgaatgttttgtgtatttgcgtatgttttgtatatttgcaagcagttttaaaatgtactcatcaagcaagaagaatttgggagattttggagatttgtattgacacttccatggtattccaaagtcttgtgtttaattagagtgggatttttagaactttaattgtggtacaatggttagacatttaaaaggcagttttattttttttaaaacgactttttttgtttttactacttctccccactttcccccaattttttagctttttgtttctcttgttgattgtctagagagggataatctgattgttggaaaacatcttgtctctccatctgtcttcgaagtccccacacctctcctcaaatacccaaagaataaagtctaaattttttagtctggtattcaggttactaccaacttgtgactcaacctgaatacacattgccttataacatatcttcctttctagccatgctggaatatttatggcttaatgttgggttggaaaacatgggtggagtcaaataggcctagagtcaaaaattgtttctgatgtatagtgactgtgttacctcaggaaattcattaacttccatggaccccaatttccttgattagaaaattgagattaacaggctgggcctggtggctcacgcctgtaatcccagcactttgggaggctgaggggggtggatcatgaggtcaggagatcgagaccatcctggctaacacagcgaaactccgtctctactaaaaatacaaaaaattagccgggcatagtggcaggtgcctgtagtcccagctactcaggagggtgaggcaggagaatggcataaacctgggaggcggagcttgcggtgagccgagatcacaccactgcactccagcctgggtgacagagtgagactccatctcaaaaaaaaaaaaaaaaaaaggaaaattaagattaacaatccctgtcatcaccctgtccttacctgtagaaatacaactcattcttctaggctaaccgtaggcctcttattccatgaaatcattctactcttccttaagtttaaagtaaactttccctcttctcttgactatgtgaactgtttctatgccttcataatggaacttcattcagcctgtgcttaaagttatttgcgtatatgtcaaacactcccaccagatgctaaggaccataaatcattaatttctctttcactccgcagagcctaacacaatgttctactttttattggtacgcaataatatttaattcatttaatgtttcttgtggaaattacctttgatcagtggcatatatactccaaagccctggctctttaatgataccaagagagatgatagaagtacttaccatccagtgtctgcaatatatttgttcaaaatgcatttgttcctaaaatatatttttctagctgtgtagattctgaggctgggtttctcttttgagaataccgatcttgcatttgaccaaagaatttttaattttcttttctggattatgcccaattcaaagttaatggtaccaggctcacatggcaatatatgctacctaatggttgctttctaatttctgaatatgctgctgaagagaaatacaattggagaataagatagacttcattcttgtgtaactaaataaaccctttcaaaagattttaaatggtatttctcaaacttatctgattcttagaacaatcttgggagcaccaattgaataagtagattctaggctccaccacagacctcctaaataatcagaatcttccactgcctcggttatcatcaaaatacccctgggtatttactacattttccaactgagacctctcacaaaatcctccccctggatttttgttacatcttaaacccagcatatccaagttgatttctcctcatggtctccatctctctgcttgctctttctcctgtattccctctctcatggatttgcaccacccagccctgccagccagtatactgggcagcagtcttcaccttaaaccttgctcacccctgactgctgtcaccacacaacccctcgactgcacttctctagtgaaggccattaatattgctcacccagatcgcttcaggagcctcctcatgccatgcaaaaaatttgcatttgttcattcaaaatatgtattttgatgacctactaggttccttcactcttatctatacagtgcatttccttgcttcttgatctcaaggatatcagagtcctcggggaaaatatccatataaatgaattctcacaaggtggggaggtgcacaaggtgccaggtacacagagaagcagctcctagtggttccctatgagatgtggacatgtcatccctctgcatcctcacgaagatgttgcaggaccagatatagacatgtgtttagtctgaaacaggtattacttgcctggttttgcacactcaggtttcaaaatcttgactctgttaatcagttatgtacctaaaggtatgtttgttcactagggatttataaacatgaacaaagacttgttgagaaaaattaaactcaatttctataatgagaactaggtatatttttatgcttgcctatatatgacaaaatatgaaaggtataaaaagttctaatataaatgtccagtccttgccaatcaaacaattggtagcctttggccagcgtggcttaggaaacattctgtccttgtcataactgattctgacttaaatgatcatctcctactcgtgaaagtctgatggtaatccttaaccaatgctttaagaaaagatcctctccccttgttatttcagttctcttccttgtctcccagcctggtcctgctccacagtgtctgtgctggaaagcttgctagttggttcagtacatacttcatgagccctgagaatttttcctaatttggtgtcttttgttcagcagtgtaccagcagctccaagaatagtgcctgagacataataattgctcagttaaaaaattgttgattaccattattaaagaaaaaaacagaaaacaacatgttctggaaaggatgtggagaaactggaacccttaaatactgttggtgggaatattaaatggtgcatctgctatgaaaagtagtgtagaggttcctcaaataattaataatagaattattagatgatgtagcaatcccacttcttgaaatatatccaaaagaattggaaacaagatgcattgcagcattattcacggtagctacgaggtgcaaacaacctaagtgtctatggacagataagtagataagcaaaatgtgatatatttacacaatggcatatcactcggccttaaaaagaaggaagtcctgtcatacaatatgctctggatgaaacttgaggagattatggtaaatgaaataagccactcacaaaaagacaaatactgcatgattgcacttacgtgagtttatctatagtagttgaatgcacagaaacagaaattagaattacggttaccaaggtctgggtggaagggggaaatggagagttgctgttcaatgggtttagagcttcagttttccaagacgaaaaagttctacaactctgttgcacaaccacgtgtatgtagataacacaatggtacacttaaaatggttaagatgcccaattttacgttgtgctttttactgtaataaaaaaaagatacagagaggatgtaataaaatgctataaactaaactagaaaaaaagattaagaacagtgttagtttaaaacaaaaaaaaattgctgattaataatcacatagagatctatgcatgaagtatgcattttttaaacaagggtgagctcatactatttgagttgttgtggaatttacttttctcacttcacaatatggtgcaaacatctttccttgcagttcagtggaacgtgacctcattctttcaaaaggcagtatgcaatcccactgaatgaaactacagcttacaagacccatctttttattgatggacatttctgtggtttttgctattacaaacaaggttacttgctattaattgcctcagtctgccaagtacagtctttaagtactgagtcattatcacttgattcacacctaaggctttgcttgccttcaaatatgtcctgcttaattctagtcccttgcttcacatacctgcaaaaatgatggtgtgacactccagctctgtttctctaatcagagtcctttgcacccacgttccctctggcaaaggtgttctttacaggctgtgatttcagacatgattttaaaaccgctgaaaagagcgacttttaggtccaaggtctataggaacccttattatgtaggaccttgacgcttcctttgtaagaccattagctatcacagagaagtagcacaaaggattactgtctaatacatttgtgacctgtattgtgtagattgcaattgcgtaattaaagttctgcttttgagagcttccaaattctcatgagccatattcctttttagaagcttaggccttagaatcctgaaatatgttttttcttcacacttcaagtctaccttgctaaaacagcatagctatctgactatgccaaacttattcgtcattatctagcataacatttacagtgacattttaaactaattagaatatgtgttttttttaaatactaactaaaaatatagaatataaaatgtttatcttttattaatagctataattccttgtaactaacctctatctttacctaagtaaatcgacctaaaatagtttctttattagactgagccccatgagggcaggaatcatatgtatctttttcactgccctagtcctggcctttggcagagtgccacggagtagaggcatcttataaagctgtcgaatgaattaatatttaccgatgatagggacaataccaaaattgtaatagtgttgatgtgagaagcatattcatatgcaatcatacaacatacacaaatgcacactgtgagcacatttgatgattatgtaatataggtgggatgatttcaaagacagcagagaggaatcttcctcttggcctgctgaaggcttaaagcacacacttagagacctagtccttttgcttaagatttcatcagcctggtaatctgtagatttcctaatgaaagacagcacatagacttgtcttgtttgtgctctgcatgtctcagtatgaaaggatatgtttttactgtggtcaggatttgttaataaccacatgggcataattaagagagaagcatgtggctgggcgtggtggctcacccctgtaatcccagcaatttgggaggtcgaggtgggcaaatcacctgagcctgggagttcaagaccagcctaggaaacatgatgaaaccctgtctctaccaaaaaaaaaaaaaaaagaaaaagaaaaaagaaaaaaaaaattagccaggcgtggtagtgtgtgcctgtagtcccagctacttgggaggctggggcatgagaatcgcttgaacgtgggaggcagggtttgcagtgaaccacaattgtgacactgcacttcagcctgggtgacagagtgagaccacgtctaaaacaaaaaagagagagagggagaagcatgagagctgggcacccattagacatggtctagcatcttcttgagaagtgaaggggacctgagaagcttatggaaatattttcctaatttagtctttcatattggcccatctttgtgagaatttatatgtgaacatatgtcaaaatggtggcaatcatgtcaaaaataatagaaacatcttagcaggttgattatttttgtagacttacacgtagtaccttgaagacaatagaacgttatttaaaaaaaacatttggctcagtgttttgagcttatatattctgtcaataatgggtggtagagaaatcaattaactataggtctcttatacacactctatacatgttgtccttcacattaagagatgatgctatagaaataagttttcataatgtatgcacatgaagatatatgtataaatacaaattaaatattctatgcatgcatagaaataaatacttgatttcctgttaacaataataacattagtaataataataatagctataatttataagaatttgccaggcactttaattcccataactagcccatgaaataggtattgttatctcacaaatgtggaaacttagatttataagtattaaacagtttaattattcaaaatcaagacagctggttaagcagaaagattgtataaatcaaagcaaggtgtgaatgacaaaaattcacggttttattcactatattatctgcctctactttttgtagaaaggcttataatgtagaatttaatctagctgtatgaaaacaaaattttgttacttttacttgttcaatgtcctgttcttagtgccaatatttaaaattcataagatctgtgttctggtttttctctggttttggagagataactgtttgatatttcatttgattttcttactttttattttaaaataactttatttttaaatggtcaaaatgtgattctattttctttcctggaaatgctcagttttaataagtgaaatggattatagaactcagcgaatcacttaggaaaactgcttgacagttttgagcaaaccttgcgtaacttttatgaaacacctccagtcagtttgtcaggtagaatttcccaagcacagtcttttttagattccgttgattccatttttaggagagcataacagtaataaggcattatcccgcaatgtgaaagctcttctctcttttcctttttaattgaaggatcaagtattcacacagggagatatctgccacattcaatcagcatctggaccttgaggggagccctcagttcatattcctattgccatgctgcactggaaaagacaaacaaatatgtttggagcatctatattcactacacatgttatttttatgacacactaaagcattgttgtttaattcttacagtaaacacaattcttcagcgtaaatagagataccttgtattaaatttacattgtattgtacttgcattgaatttccttggttatatatgacaacctattgagcaccttaggaaatacaatttgacataacatgatgaagaggcacaaagatatatatcccagtggatatgctttatggacaattatcatccagcttccctgtgaaaattaaacaccttaaaaaccctatcattatggaaacagaaaggtgataaacttgaaactccttctgttgtacagccaatgggaattaagtatccattttgtggattatccattgaagaactgaatgtctagaactagattaaattaaactgaattaagccagaacctgaccccctttgccacatggcatgttacagttttattttgcttcagctgtcttactgattattagtgccagagaataagcaagaaaaagcctgaaaaaatacaatatggtacaatataatagagtaagtgattttttatggtgaatatttctcttttgcttttctagattcactctttttcaactctgccccgtgccctgtaaggctgaaccttcctcacagtggcaatgggcttcctctctctctggcttcctgttggtttgtccatgggcagcaacggcaaaagatgagagggtgagaggagcatggagtctcagaactcattctccctggctctctttctgcatggctctggattccagggttgcattcctccagtaaaggctacatttcctatttgaagcctctttctttctccaggttcctgaatttgttctcaccctttcctctaaaaacataaagaagtttactggctcctagccaactagttaaaatggtctaggaatcttagctagtactagctgggaatgctttattgtcactggttgctttcccttaaccctgtccgcatctttgtaaataggagttccactaaaatcttttccatgccatttgagttgtcattggtttcctgttgaaaccctgactcattcctaaattttatttaatccacatttaacacggagaggtgttttttgtgtgtgtgtgtttgtttttttgatgggggggtagtgcgtgaagataaatttaaaatgactttcttcatgctaagagtggcaagaataaataagtaaatgaacaaaatttccattttcttaaactttgtttcaatacaatagacatcttaaaggccaataagaagagccaagctcaaagattctagtggcggcttgcttatctaataaacccatcatatttaatttttcaaataataatcaacttattgatatatctttgaaagcttttcacttattgttataaaatatttctttgttatcattagtgaaataatggcttatgacatcttcctcttgatgaagtagctctgagtgccaagtttagcttataggtcagtttcggccaggcgtggtggctcaagcctgtaattccagcactttgggaggctgaggcgtgtgtatcacctggggtcaggagttcatcaggagttcaagaccagcctggccaacatggcgaaaccccgtctctactaaaaatacaaaaattatctgggcatggtggcaggtgcctgtaatcccagctactctggaggctaaggcaggagaatcacttgaacctgggaggcggaggttccagtgagccgagagtgtgccattgcactccagcctgggcaacaagaacaaaactccatctcaataaataaataaataaaattaaataaaaatcaaggtcagtttctcagataagccctattacgtatcctacccagactaggttagcatccacctctcccttctctatcccatgttttccttctatccatctgatttttaaaaagtaaactttacatcctcataatacctctaatgtctgttctttcgcttagattgaaagttttgtgaaggaagtaaccatgactgttctgacaacttctgtattaccagcatgcaacacaatgtctggctcatagtagctaccccatagttactgatgagccagatgactaccagaaaccaaatctaaatccagcagacttacaaaaattattttacagtatttagtaaatacttgtttctttgcactttctggacttcattggaaaggaatgaattttaaatgaaaagatagcatacaaatataagaaactattggctaatgacagatagtgtgccacggaggaatacagacctgcctaagcttgtttttgagagatgttagtttagtttttacaagagaagtgcagcacatgacataggtcagaattggaggagatagtctaaggtgagcttcctatagcaagtaaaactttaactcatactagaagcaaggggacagttctgtgtgtgtcccttctatgtgcacagtgcttattactaaagcacattcatatatgctcacttgtttgattctcagatcaactgtcaggccaccagggcaaggaatattaccccattttgttggtcaagaaatgaaagcttagtgagttttgctatctaaccaagttttaaaggtacgtggtcatgacagaagggctgaagtggttggaggaagatccctgaaaaagaagacaattggcttggaagcttttgactttgttttgaaatagttcccagaacaggagacgcactcaagaactaatttgttgattgaatgattacttacgtaaatgtatatgcacaaaattgatacttcaaaataattggccatacaatttatcctgttctgcaacttgctttttttctctaattcacatggagtaaacatctttttatgtcaatagcatagtgctccctcatttttcctcaaagcttagtaaaatgccattgaatgaaaccacaacatttatagaggctatctggtaaatgattaatatccattccttgctacagctacatctcattaatgccagctaaccattaattataaaagatgttgacaataaggtttggtgcttggactagtagatagtcctcaaatggattctcatttatttggatttggtatactccttgaggtagtgttgcaaggagtgtttagccaatagttatatcctgaggagtcctcaaggcctgaggagaggaccctgaactagctgttaagcctcctcctctaaaacaaagtcaaacaacagggttgaaagtcaaagaatgaaagagaaaagaaagctgatgtgcctattttaatatcagacaagactttacagtgagtagtattattagttataaaaatgtagtttcataataataaacgagttactaaaattaacatttattttttatcaaaatatactataagggcccacaaagataaataataagagagatgatatttagaacacatgtaaccatcagaaaactgtatccagaatatataaaacatgcctacacatctataacaaactggagttaacatctgaaaagtcatttcacaaaagaagaaaaattaaatgtctgataaacataagaaaatgggccaacttctgtaataatccaaaagtaaaagataatacccaaacaagataccattttttacatctaatactggcaaaaatttcaaagtctgacaataaggtctttttgaggatatagaacaatgagaactcacatggactcacatgtacactagaattgacatactttcaaaaagagatgagcattgtctagtaaaattgaacatatatcaacaattcctctccaggacatttgtcctagaaaatttgtgtatgcgcttcaagacacatatacaaaaatgtgtataattacattgatgtcatagccaaagtataaaaacattctaaatatctatcaagagtagaataaataaataacatttgccctgtaggaatactacacagtaatgaaaatgagtgaagtatggctactctcaaaaacatgtatagaacacatgaatatcatgttacacaaagcaagatgaaaaaattatatatacaacataactctattaatataagttagaaaaccatgagaaacttaattatgttgttaagggatgcatttctcagtagaaaagcaaggacatggttcttcaaaagtcctcatatttatctgtgaggaagggaaagggatccaattatggacaggagatttctggggtgctggcaacattctattttttcaacgtgagtgatggttacatggccttttgcttttaaatttgtcattaaaatagaattgatattgtatatatttttatatgttatgttttattacgtgatttttaaaatgtagaaagaataggtatatggaagccgtaaagttgtatgcactgtagagtctgaatgcttcagtgccgacacatagctctaccacttcctagctgtataacactggccaagttaccaaacctctctaaaagcttttcttgtcatctatttctctcatctaaaatagaacccattccactatcaagagtttttcctgaagattaaatagtacttgattaaaacgctcaatccagtgattattgctttagcataaacttctttggactttaaagtgtttgtgtcttcttacctggcatgctcccctgcacaacagtattttttaatttaaatattttattttgagataattacagattcacaagaaattacaagagacagagattccatgtatctttaattcagtttctcccaatgtcaacatcttctaaaactataatacaatatcacaactaagattttaactctgatataatcaagacacagaacaattccatcacaagacatggtttcttcttatcctcacactgaaaaacaattccctttttaaccaggaacagaagggtaagttagtactttggaagtaggcttttatgagattaacgtcattgttcatgtttgataaaggaacactcttttctgaatagtgattttatcataccatattgcaatctaacacattccatccctaagtgtcacaagttttttttttaattaaaaagaaagtatatataactgctaaagatatttcttctgccacagactactgctgaaatgcagcattcccacatccctgcctcattcacgactacttcctatacattcaggaaaagacgtctttaataattatttttcctgtttgatatttttaaccatctcactgttactacctgcatgggcttccctactccagtctattttacatgtgattctagattattttttctgtatatgactttatcttgtcgctagtcagttcataaaaacactaatggtctcctgtgcatcataaaatcccaactccttgtagtgtcattcaaggccccaaattccctttgaagttttgttttctattagactttatcgagtgatatggtttggctctgtgtccccacccaaatctcaccttgaattgtgaaaatccccatgtgtcatgggagagaccccgtgggaagtaattgaactatggggggcatgtttttcccatgctgttctcctgatagtgaataagtctcatgagatctaatggttttataaaggggagttccctgcaaaagctgtcttacctgctgccatgtaaaacatccctttgctcctcctccaccttctgccatgattaggaggcctccctagccatgtggaactggggagtccattaaatctctttcctttataaattacccagtctcaggtatgtctttattattagcatgagaagggactaatacatccagctacaggaataacaacagattattgatctatttgggatacctttactgaaccttgcactttcttacttctaggcagtggcaaatgtcattttcctcaccagaagcatcttcctgagacataggtatttcacatattacctttcatgggagacttagcttcatcatatgacttattgaagtccccactaccgtatgtggaagacttgactgctctaaaaagcctgtaacacttctttagccagagtgattattccctgctagagggtcctgtacctactgtctactatttaattatgtcatttgtttggcataaagttgttgtggtgcttatgatccttgtttaacccttgaattgttatttaattatacctatgtttaactcttttcttacttccataaaggtagatattattcttattctgttcttacttcccaaaataccaagtatagtactttgcacttgattgactttcaatatatttatattaatctttttattaggcttatcttgattgctttgagaaccagagcatgttcaccagttcttaattcaagtgaaattcctaaaaattttagaagaggaaattagaccagaaacatataacaagagtagtgaccagagtggggtaagatggccagtttccacaactaaatttatatttgtatggccctgtaaaatgggttagcccctctaagaatccattccctcctctttacagcaatgacaacaacaattcttattttttggagttgtcagtgttaaagaaaataatgcataaaagcatgtaccctattgtctgtctcaaagtaagtgatcagaacattttaattttcttttttaagaaaggctctcactttgtcacccaggctggagtgcagtggtgcaatcatggcccactgcagcctcgacctcctgggcctgagtgattctgccacgtcagcctctcaaatagccaggaccacaggcacatgtcatcatgcccaactaactttttgcattttttgtagagacagggctttgccacattgctcaggctggtctcgaactcctagactcaagcgattcacttgccttggcttctcaaaatgctgggattataggcatgagccaccatgcttggcctgagcatattttaaattactttaaattattttgggctggtggcagtggctcatgcctgtaatctcaacactttgggagactgaggagggtggatcacaaggtcaggagttcgagactagcctggccaatacagtgaaatcccgtctctactgaaaacacaaaaattagttgggcgtgatggcgggcacctataatcccagctacttgggaggctgaggcaagggaatcgcttaattcgcctcctgggaggcggaggttgcagtgagccgagatcatgccactgtactccagcctaggctacagagatagactccatctccaaaaaaattaattaattaatttaaaaaattattttaagtattctataattttgaaaatacttacatggcatttcaaggactcaaaatcttactttccccagagctactcataaatcaaaactttgtttaaaataaatgaaaacagaggtacaacataccaaaatctctgggatgtagcaaagacagtgttaagaggaatgtttattgtgctaaatagctacctcaaaaagttagaaagatctcagtttaacaaactaacatctcacctagaagaacaaactaaactcgaagctagcaaagattttttttattactgattcaattttcgaacttgacattggtctgttaagggttttaatttcttcctgattcattctttggaagttgtttgtttctaagaattttctctgtattttctagtttgtgtacatagaggtgtttataatagtctctgaggatgtgttttgcttgtttgttgttgttgtttttggtaggaactgcctcccctaccccgccgaaaaaaaagaaaaaaaaaaaaactggaccaggtggattcacacccaaattccaccagatgtacaaggaagagttggtaatgattctactaaaactgttacaaaatatcaagaaggaaggactccttcttaacactttctatgaggccagcatctctctgatagcaaaacttgtcaaagacacaactaaaaaaggaaactacaggccaatattcctgataaacatagacacaaaagtcctcaacaaaatactagcaaaccaaattcaacagcacagcaaaaagttaattcaacacaatcaagtaggcttcattcctaggatgccaagtttggctaaacatatacaaatcaataaatgtattcataaatctccttgagttggaaatatatttaaaaacatgattcatcatataaatagaactaaaagcaaaaatcacacgatcatctcaatagatacagaaaaagctttcaataaaatccaatataccttcatgataaaagccctcaacaaagtaggcatcaaaagaacatacttcaaaataataagagctatctatgacaaacccacagccaacatcacacagagcaggtagaagctggaagcattctatctgagaacaggaacaagataagaatgcccactctcaccactcttactcaacatagttctggaagtccttgccagagcaatcaggcacaagaaagaaataaaagaaatcctactaggaaaagaagaagtaaaactatctttctttgctgatatgattttatgcctacaaaacccaaaagattccaccagaaagttcctggaactgacaaacaacatcagtaaagttttaggatactaaatcaatgtgtaaaaatgagtagcatttctatacaccaataatgttcaaactgagagccaaatcaagaatgcaatctcatttacaatagccacaaaacagtaaattcctaggcatacatccatccaagaaggtgaaagatgtctacaaggagaactagaaaacactggtaaaagaaatcgtgtatggcacaaatggaaaaatgttccatgctcatgaagtggaagaatcaataatcactaaaatggccatagtgcccaaagcaatttacagattcaatgctatttctatcaaactaccaatatcatttttcacagaattaggaaaaagctattctaaaattcatatggaacccaaaaagagcccaaaaagagccaaagcaattctacacaaaaagaacaaagctggaggcatcacattactcaacttcaaactatactataaggctacagtaaccaaaacaacatgatactggtacaaaaacagacacatagaccaatggaacagaaaagagaatctagaaatacagctgtgcacctacagctatctgatcttttacaaagtcaacaaaaataatcaatggagaaaggactgcctattttaaaaatggtgctggggtagcttgctagccttatgcagcaaaccagacccctacttttcatcatatacaaaaactagctcaagatggattaaagatttaaatataagatctcatattataagaatcctagaggaaaacttaggaaacaccattctggatgttgtccttgggaaagaacttatgaccaagtcctcaaaagcaattgcaacaaaaattgacaagataaacctaattaaactaaagagcttcagcacagcaaaataaactatcaacagagtaaacagacaaattacagagtgggagaaaatattcacaaaccatccatttgacaaaggtcaaatatccagaatctataagaaacttaaatcaacaagtaaaaaacaaataacctcattaaaaagtgggtaaaagacatgaacagacacttctcaaaagaaggcagacaaacagctaacaaacatgctcaacatcactaatcatcagagaattgcatatcaaaaccacaacgagtaccatctcacaccagtcagaatgactgctattaaaaagtcaaaaaacaacagatgctggcgaggctgcaaagaaaagggttgaatgcttatatactgttggtgggaatgtaaattagttcggccactgtggaaagcagttgaaggtttttcaaagaacttaaaacagaaccaccatttgacccagcaacccattactgggtatgtacccaaaggaaaacaaatcattctaccaaaagaaacatgcactcgtgtgttcatcacagtactagtcacaagagcaaagacatggaatcagcctaggtgcccatcaacagtgggttgaatgaaaaaatatgatacatatacactacgaaatactatacaaccacagaaaaaaccctgaaatcatgtcttttgcagcaacatctatgaagctggaggcttttgtactaagcaaattaatacaagaacaaaaaaacaaatattgcatattctcatttataagtgggagctaaacattgggtattcatggacataaagatgacaatagaccctgaggattaatggcagggaatggggagtaaggactgaaaatctaactgttgggtactatgctcactatctgggtgatgggatcattcacatcccaaacctcagcatcacacaatatacccatgtcagaaacctgcacatgaacccccgaatctaaaataaaagttggaaaaaacagctattgatacatgtcctgtgttctagttaaagaaaaaagcatcttcttaggcttcagtttaaaatgtccactacattatatttgttagtttttgttactctgtttaggaatctgaggtcaatgaagttaaaattgtcatgttaataggtgttttagacttaccgcttattaaaagtatgttttaaagctgaatcatacagtgttttatattatattgattttgtttatattgaaatcagcttaatatgatgtgtgtgtgtgtatcaatataatactagtcctacagtgtggttccacaattcatccttcagcccttcctccatatgctgtcaaatactgtttacctacaggatgccgggtaactctgtgtttgtgtgtgtgtgtgtgtgtgtgtgtgtgtgatctcacctatgttaaagttagacttcattctcatccacctctcaattagatacatcctggatactaaaaagtttttgagcagttgaattaactgtcacaaatatcacttaatttcattctcagcttatttgccatgtattcatcttagtctaagcccttctttcaataactgtctgctcttcctatatccatagttccagatgtcaaggttatctagcttctcaacatagattgctaagggttgacttactagagtcagatagacaaaaaaaaaaaaaaaaaagaagaagaagaagaagtaaatttggagaaactgtcactgagagaggatgtagaagaactcaaacaatgacacaagaattggtaaggtgcagtcactgagtgatgtttagggtaaaagctgggtaagaaccctgtatctcatcaatcactgaagcattatagaattagagaatgtagtctttggtgtccataatcaaagtttcagtcttcacaaaatgattcaattatattcattatattctgtgtgagaagacaggtaagtgtgtagaacttactagaaggatttccttcaaaagtggttaagatttttagagttcatacttaaggggatgagatttagtttcaatgaaaattaacttctataaaatatctcatttcccaatatgtcagataaatgagatattatgcacataatcctaacataaaagacattctctgttccccaattatgtaagaaaagggaactattgatttaggtactttgtatctcagttaaaaagcaggtcaaataggtagcatttcaagggtcttatggtttctttaagagattctgtaacacactatttgtacataagatttttttaggatcaactgactgcttcacagagagcctgacatgtaagaattttttggtcattgttattacctgatcatatcttttttccctttaaattttctatgtattataggtaggtggtgttttcactatgtgtctttcacttcttagctttaactcatttgtgtctttgtgtgtcaagtactacatagaattaaatcaaataccttccataggtattcataaagttaccatagatggtcacaccagaaataaagaaaaacagatactggcagccacatctttttgtgtgtttagagctataagtggtacctgagagtaaaataaaagatctttcccaaaaatttggaaataagggaaatggacttatcagaatggtaaactatacaaggttgtcttcttaaaggaaaatgaatcacagcagtggctttttaaaagtattaactcatttaacaaaaaatgctttaatcctaaatgaatgtattgtcctagatctgattggtataagagaaaacatttcagatattcaaaacagagggtattttatacaagtaggttgttctcaaggtgttgtaaagaagggctggaagaacaaaagggaaaggtggcaggtactggatggaagaaaaggatgattgacaggagctggtgcttactgctacacttgccgatttgacatttgaaccattatgggacgctgccccaaccagagctgaaatgccaacaacattccactaccgaagaggcagaaaatgcagaagagatgcttcttctgtctggaatgcttgaggctgcaggtgctttgtcccctgctgacacagcagctgtcaacaaagccctcagctcttggagctagaaactggacgttttctttcttcctgcttctgtcctcctcacagtgcctcccactggcaaaacccaatagaaggccaacaagcaagagagttggaaatgtagtttgtagtttgtaggttcagccgtacagaacaggctatagaagcgtggatgtgtagctggggcggacgtcagatgaatcaccttcttagctactcggcattcacacacacccttgtacttttcaccacctttcattaccaatagcaatcactctatgcttccaatgaacatgatactactatgctttgtacaaatgacggtgctctcacctccctcatcacattcttatctgggtgatgttaattccccttttagttcaggcacaacccatctggatattcttcaacataaaaaaactaaactataaattaatacccactaaccctatttacatgaatcaatggggaaaggaggacggaaaattggctacaatatacaaatctctgtgtcataagcagaaataaaatatgatagcatttataattcttgtttatataattagttgtgagaccatagctgatatttacaacttcttctctttgccctcagctggtagttcatttgtttgtagttcttttatttttattttttgtagagatagggtctctctatgttgcccaggctggtcttgaactttggggctcaagtggtccttctgctttggcctcccaaagtgttgggattacaggtatgagtcaccacacccggcttatttggaattttttacttaggccactggatcttcattactaagggggtctatgtccttcctgttctatcttgattgggttgctgcagattttcaatgcttatatgattggacctggtcatataaagagatgcccttttgaatgtcctgactgacaatgtgcagtaggaagccagtttctcctccaatatgataccttttctctttgcctgttataggaatgctatgaagagagggttaaaaagaagccaatgtgtaccaggtgcttagaacagtgcctgatacattatgagtcatatagaatgcattaacaaataaggtcgatttacttctggggcatatctattaagaatatcttcttttagaaagcaatacaaattataagtatgcttcacttattaatttttgatctggaacacacatgacaacagttaacaggatgcaatagaaagattctcatgctggaactgttgggttctatttctgtctctgtattaattaggtttacagtttgatattcaagggtaacatctattttatcctttggtaagagacagagtttagacaaggagaaataccagagtctgtgatttaatgattccatgaaactagaaatcacatcaagagtgcttgctttcttaagaccttctttgctattgtctagtagtcatactgaaaggcaattattatcttcccaggtgttatcacgagttatggattatatctagatggtatattaatccacaattcctcagaactcagctatcgtgcttacggatttgctccttggagtttacattccttcagagtccaagcatgcacggccaaaggttgtgctctgggcccactggtgagtatctaaatttacattctaggaatgtgttaaatgtcagatgacactgaatattaaggaagaagtaagtggcggtgactcaccctctgcacagctagcctttcaagcaggatgggagatttttctttttataaaagttcatttaagagttactaagattttatattcgacataaatttcaagactgaacataggtccagtgaagggcagagtctacattttattgaaagaaagataagttggctagtgtagtaggcaaacatgaaatttttcctaatttagtgacatattgaaggcagatgtttttctttctaatcatgggctcaacatctaagtaagtttaagattaagaagtaaaaataattgaaagtccataagtgccacaatatggcaacactgctccccaaaaagtaatcaattaaaaggttgagtttacctcatctgttaggataaaatagtttcatgtgatacagcttcataagaatggtatttaaaattacatcaatatcagcttttgatattcatatttcagaaatctatatctgaaatgtatatctatatttcattagcagttaacagcttgacaagattatgttttctattcctaatataatttttcaaacccaattaatagcacttaattatcataaactagcaggacagtcttcagtttcaaaacatcacattacactttggtgcatttttcttgattaattagattttgcttctttagatggaaatgctcattagtcttagatattttttggcaatgtttgctaatgccctatcattttagtgcatgctgtcttcactgaagagtatattatataaatattaccttggaagacagctctatgttttaatttctgcttccttatttttgatcacacctctctttttgtttcagagattggttgctttccaagcagctaacaccatccatcggcggagctgagctgtagtctttattgccattaagcattttatagcccagacccctctgatggatacttacccttaaatgcaggaatggcaataggccagcttttcttatccattcaaaaaaaaaaaaagaaaaagaaacaaaagaacacgtcacatgagattgaaatttacactttttgaaaatgtaagctgcaaatggtagttctggctacaaaattggctcagcggtgtctcctgatgttctggcaactttaaataagggggacctgcattatcaacctgcatcctgcacagacagtagctacgttaaccttaagaaatcaaatgccacaaagctctgataggaaggggggaatagaattgggttgtaaaacctagtctgccatggcttcattcattccagactcaatcctgacttacagcacagagttattttctcccttggtacttttctttatgctgtactcagtatgcaaacgcttttccctagtcaatgatccatctctaatcactgggattgaagagcaatgtctttatttagaacaagtcaactatatgctaccaagaagttaaagcccatggtcttcaactggtttgtgaaatatttttgtgcccattaagtgattccatatctgagtattctaaatagccctggatggctagcacaatcatgaaggatattacagattcagcttctttttgttgatgattcttttaatgtgtccttattgacttaagaaatctatgaatcaatcttaaaaggcagagttttctatcattaaattatgatgtgatactcaacaaaattcagtcaaacgtggcaatggtgtacaacggtttcttaagatattcatctaaatagagcccgatgctatgacattttaaataaaaaatttcattgaaacagaaaatttatcatttctatttttaaatattttgctggcagaaatcagaataaattttgaaagagttcaatttttttgttcatctaatatttcttaatgataattcttgttctttagattatccacacatgcagggaaatactattcaatgttttctatgaggaatatgcttcacagtcccaaatatgatatggttcatcctccaaattgcaaattgttcatataataaaaaatatgaatttgatggagaatttttaaaaataaaaagacatacagaagttccatattcttaccacttgaatgtagtattagctcatttttttttctaatctgaccagtttgttagctattatttatggttcagaaggagttgccctgtacctatctggaaaaaacaaaaacaaaacaaaataaacagcagcaacaacagcaacaaaaaaaacccacaatgattctcctgtggtttttttcagttcttactcaaccaaataatgtatttgactcttatggaaatttcaatatagaaaacaattgacaaagcctttgaacctaatttttagatgctaatgtgcattgtcaagttaaattcaataaattggggttttataaattttgaaataacataaaaattaacagaatgcagcaggaactttttaaatgctttccttgctttcaattgtattagagggaaacccttcacattttgtaatattctttaataaaatacaataatgttttccataagaaaatcactttgctttcttactccccacttagccaatgttacataacactagtggagtctaagattgagaattttatgactgtgtcttgtattgtaacattcattggatcgattctccagggactcttaaggatgatatgcgagactataggtcattgctatgtgatatggctaaaaagttgtcttggttccttagtgatgtcatacttatacagataaatacacctggataaatacacatgtacaaacacattcaccctttcacattttttttttttgcaaagaagcaaataagtgtgttatttaagacatctaaatcttaatggcaatatataatatagtcaagcaaacgctataggggaagtctgccttcaacctgcttaaaccccttaaatccctatacccccttaggagatatacttattctacaaagcctcagatttctcaactattacaaagagaaataatgtctactttaagagagttggtgtaaaaaattaaatataacttacacaaatttctggcgcattgcaagagttttattaagaataacagtttatggccaggcatggtggctcacacctgtaatcccagcatgttgggaggtcaaagtgggtggatcacaaggtcaggagttcgagaccagcctggccaatatgatgaaaccccatctctactaaaaatacaaaagttagctggatgtggtggcgggcgcctgcagtctcagctactccggaggctgaggcaggaaaatagcttgaacctgggaagtggggattccagtgacccgagattgtgccactgcactccagccttggagacagagtgagactccatttaaaaacaaacaaaagaattacaatgtattaaagtgtttgtatgttttattgcacatttgctctcaaatattttttctgtgtcaagagaggttcccaggccaaagccaagccaacttttacctttcccaagtgccttttccacatattccttttacagcaaggtagataaacaaaaaagtaaaatgaaaaagaaagaccaggtcagagcaaaatagtacaattgccaaattcaatgtatagtaaaaactgaagtgtttatccaaatatttaaggaaatgttacaaaacatatttattttgaattaaccaaatatttgaggattataatataattatctggaattgcccttaattcttcaacttttcaagtctcattttatttggaatgctttaaaatcattctatgtacaataatatgaactatatagataggcataataaaacaaattacattgtcataaaatattaaaatgatgaattgatatttttctggcctagtttcatcatttttgtatgtagctattaaactaaaaacgaaagagcaagtgttatagttctaaagaatcccatagcttttctctgatgaaaataaaacatgttgtgacctcatagttattaaaaattaacactttctttttcacatttattttcataattgataaggtataatcaccctaacaaataaaggttttctaattgataatatttctgcctaaggatttcatgtttgatcacctccttgggaggcaagagcttgtaccttaagaataaagttgaaattatcacatatttagtaaattgtgaaaggtcaaatatctatgagtgatgctgatgagtttgtagtgattagttaactgaatttaagctaatgattaaaagatattaaaaatttctgaactcttttctactttcttgccaactacatcttcctctgaccacttattttacttatttatctattgaaatcttcctgaccccggtacagctagggattgcattttatttcagagtctttctcttcaaataattcatcttttgctcttttctgcatagcttcattaacacaatcaatatttttttgtgattgtgccttagggatagagtccctaggatgcatgtatttcttaatgttagcatgatgccatttttacataactgatagcaacatagctcataaaaattttgcgtgtgtgtgcgtgcatgcctgtacacacatgtatgcatgcgtgtgtgtgtgtgtgtgtgtgtgtgtgtgtgtgtgtgtgacagagaagagagagagtcaagatatgtggtgtagctttttgacagaggccagaagtctaccacctaagtcaaggacttataaaaacagactgcgtgcatttcttctcttttgcaatcacataaaaattattttaaagcagtcctagaattggtctatggatatgtacagccataggcacagtcacagtgtgagcagatccacatattctggaaatcacaaatagctgccttggtcaagagctcaaattctaagctttaacagcagggggaagaaaacatgaggtgtgctttgatcctgctgacaaaatgaggtattcatacaagatgctactgtcaaaatagtttacttcacagcaaaaagagattctttgaagaaatatgctcaaagcgaagcatgtacttattttatttgcaaacaaaaataaatctttttatactcacaggtggaaaatcgaactctagaagctcctcctgaaggaacagtaaatgtgtttgtcaaaacacagggatcccggaaagcccacgtgaggtgggaagcaccttttcgccctaatggactcttaacacactcagtccttttcactgggatattctatgtagacccaggtaatttgtttttattttctaaactttaaataacattagaaaacaactcatttttatttaaaatctttcttttggctaaaatctttcttttagccacagatgttggtttctttattttcctgaaaataacctatacggataagctactgcccgacggttctcagaatgtggttcccagagcagcagcaacagccacatctgatgaacgcttagaaatgtacgttgtagagcttctgccccagcctagtgaatcagaaactctagaggctaaggtctaacagtctgtgtttaagcaaaccctttaggtgacacatgctgaagaactagtatatactcttcttcccttgctaaaaagtggttcaaacctaaaacatcgtgtatgcaaagagttgaactataattttgcagtccatcttaaacaagccatttttgtgactgttttagatttctgaactatcttagtaattctgctgtgtgttctgataaatttactgaatgtggattaggctacatggggttccttgaaagtattttcaaaaactatctgattcaataagttaggtgctatggtagcatgatgtttattttaagcaaactctaccataaaaagagcaggtatatattttaatagaaactttggatctgtattaagtgctgttgtttatcatcttccaggagtggccttactatttttgtaggaggaagtttgaacctttatttttaaatgagtagcaaatatgcaatatcgtggattcagtcagacatgttattagcatgttagtctgttgcttaggcttgaaaacgtttctttgtttctgaattttctatgagtctttgtaatacttaataacatcctccaagtgtaaaaacaggtgaagaaagaaaaaaacaggcttttctaaatttgaaaagggtggttatttgtgtactgcactggcaagcaaatgcgagtcaagtgcgtgtcagagtctaagctgatcccctcaaagattggtgtgtcccttttttatgcaatcagggctttcatgtattctgctgtaaagcacttgtaagattatgaggtgaaggagtgatgatcgatttgaaaaaagaagcaacatttaggccggacccatgacagcccagctatttccgccaaggcagctgggtgaataatgcaagagccatattccccctcgtgtttaatcttgcattgtttttgcagagaaaatttctgcttgccttctaagtcatgtcatcttcagttgtcatcccgtctctcaaaccatcaaaacggtattaaatgttgcaaagctgcgcggcaagagaactttcaaaagtcagaacccatttaccgaacagcccttgtagaaaatgtattctgttctcggcagaattttccttcagttctttccactgagaagtttactgatttctcccagtggaatctgctggaatttatcggttcatggttggcagtcacagattaaggtaaatgtcgatccgtaatgaccctctacatgttagtattgcagtaaagctgggcttttatgtcaaagatatcggagagggagctattacacatgacaggggtgatcaagggactccagaccaaggcaagcattattaaatattgactagttctgtgatttatgtagagctggaggaaaaaagtgactttttaaccattatatattcttcagcaacgaaaaccagccatttatctcctgctggtaataaagaacagagtgcctgcatattttagtggagggaaaacctggtcttataaatgagatgaactccttcgtgataacatttcagtttgttaattgccaaaagcaaaacagacaaattggaagcaattacgagatttgacttaaagaatttttgcggtacgggttcaactcaggggttggaaaggggtgaggttggaagcaaaaggagcatctgagatgggccccaggaaaattcgtgtcattggttcactggcactggaactctcatgtccactgttaactgaaaggattttgaatattgtcttgtcctgtcacccatcagcagctgggtgacatttacactgagggtagggaggtctgcatggctctacaagaacaaattaaacattaattcatcaaacttatttaagatatcatctgttcactagatttatacaaagcttattgaattgtctaatggctaattggttatttccttgacataatgaacaactgtatttcatcctttcctgtgatggctgctaaagagggggtggttagaatttataagatagggaaattcagctagttcaaagcaagtgtagtttcaacataaaagtgcctgcagctgggtcactattttgcaggagaaattgggctgtgtctgtaagacaccctcatgggaaccctattcttcatgtcaactcgtatcctgaactaaaaactttacaaaaacattaggtttcgtaacaacaagtgaagtggcacgtatcaaagtgtgatttttcttaaaaattgttcacttttgaccacgtattatgttctcatgaatcaaaatttaaaagatagaaaaaaaggaagtaaagtaccaagcctgttctgcagtctcagaggaaaagtagtgtgctcagcttcttatatccttctagaaatatttgtcttataggtgtgtgtgtgtgtgtgtatacataaacaaacacatatttcccccatttgtaaatacatatagttttcatctcacacatgcaacattttatactaatgataccaagtggtacacattattttgcaccatgctttttttccatcttaataatttcagagaaattatcacagcaattcctaacgagcttcctcattctttatatagcttggtaatattcaacgggttagagcataccatcattggtttaaccagttccttattaatggccatttaatttgtttctaatcttttattatttcaaataatgcctcaatgaataaacatatgggaatgtcctttcacactttgcaagtaaattaatacgataaattccttgaaatgaattgccaggtcaaggaaaaatgaatttgtaactttgtaagatactgtcaaatttcattccatagagaccatataatttatattctcagaaaaagtatgagggtgcctgtctccccacagtcttgtcatcagagtgttgtcagacttatctttgccaattcgatatgttaaaaatggtagctatttcacagtatcttgagtagttattaggaattagttggaacttatgaacatattttcttaagtttaaaaactgtgtttcttttttttgtgaatgcttcatttgtatcttttgcccacatttttacagaggtttaagaagttctttatatattaggaaaatctgttatattagtagaaatttttcccttcattattgctttttcctagcactctactgctttcttttataaaatatttatattcagttcatctgaaatttatactgatataatatgtcatgtatgggtcaaaccttattttcttcccagaaaattttcctttctctcaaaaccatttactgaataatccttattgttccccactggcttgggttgtcatctccaagagctcctaaatttccatctttattaataaatacgtgtggacatatctgtacctttatttacattatcaaggtatcttaatgattaaaactgtagaatatattttattgccttgtagatctagtcctcttcattatttttattttatataatttcctacttattatttcatatttatttttttcaaacaatatttatatatttctaattttaccccagaagtcctgatgctgtttttataaggatggaacagaatttacaggtgacttaggtagaattaatatctttatactgtcgggtttttctgatcaatgatatcattatactttctattttgtgtcttttgtgtctctcgcaagagctcaaagttttcttcatatagatcttgcatatttctgttgtgtattcattaatattttataattatacatgatttaagtaattatgataatatatacattttacatattaacattaaaattaaataactgaaaagagctactttcaataattatatgtagacttcactcgcagatacctgtcttctgaaagccacgattttaaatgtttatatctattagatgatcgttcatctaacttttacaaatatttgaagtttttttgctgctaagattattgtcattttctctaaaatgcaggcatcttaccaggggaaaatgataatctaattaattagactctcaactagtttgtggtgtgtaaaatggcaacaaaggttggacctgaagaatctctgtcctgacagaatttacaaataaaaaagctaaggcagacaaacttagccaagttattctcaagtgcatgaggcaggaaagaaactagatggtgtgacaagtggaacagaaataattaagggaagattttggtaatactgggtctttctctttaattatggatgagaataaactgaatatggaaaaactaaagagaatgacggagagagcacaaacacatgtgaatggcaaaaattaacagatcaaccaacctacacttggttatattagaatgtatttttgccatttgctaacatccaccataaaagtaaggattagcacttttctatgggattctacctgatttgaaacatctattcaattatgaggaacatatgatcaacaaattagtttttctagggtgtgcaagtgccatttactgacctggaataagtgctttgctcaatgactctcaagggtgcaccattcaccttgcacaggtgaatagtcaactcccagtgatcactttacaacatcttcagtattttttcacacatatgaattaactatcaatttaaattatagataacaggtttataatcattccttgtgaaacatattgaatatataatttttaaaaaataaaacaaatgtgtaagtttgggaatacaaataaaactttacagcatagtagtagcaacctggcttatgtaaaactatttataaaattataaattctattccatttaactggtagatgaaagtattgtgccatgataatttagggttacatcattattttacagagcttcaaaagtattctcagctacaaatataaaacaacctaattgtcaagaagaaaaataaaaactatgaaaagataaagaaaatattctgagatcctatagaataatttttacaaatggcagcttctttactactagacttcccttggattcttcacactgatcctgtacttagtagacaatgccatgtcttagtacacatatcctgcttttttcttaagtggttattgtggagtcctctgcgaattgtttaattcttcattatccttccttttgaatgaattgggacgtgatcttcattgcttgatatcctgacagattgctttgtgtcagagtttctaaggcaaggcaccagcgtgtgctaattgctgagtcctttgtgcactgttaactctcacctgctctgaaaaactggattgcagcttagttttcatcttcaaatgtctctttctcctaatcccctattttgtgctgtgccacagaataaagatatttatttgaaaaagagagatatggattactgtgggggaaaaaagagggtaaatgaaaatgatccttaagcattagcaaagggaaatggcattttagaaaaacaaaagaaaagcaaagcagaatgatcagtttttaatgttgaaactgaatcatttcatggatctcagataactctttctgaatgtggagaggtacaacaaacaggttttaggtgacttttcccagagtaaatatgtctaatccaaaataagtcctcaaaagtaagggtggaaggtaaggaccgggaaagaaaggaaatggaagatagaaagaacaatttttaaattgttaaatgctcatgaaatgagcataatcagatgctttttatttgcttataagacctgatggtcctgaaaaaaagaaacccaattagtatttaagaatgtttttaaaaaggcaaatgaaaatttgggaaatatatctgttatctctaggtggttatattatgaatggtttgtcttcccatttttccttttatatgtactcaacttaaaaaaaattctataatatatacatattatttttgcaaaacattataaaaaatagctcacaagagcagatgattcaagagcagagtaatttggagtaagcatggtgcttctggctccaaggaggagatccgggtggtgagtcagaagtcctaaggtggaagcttacagaaagaagggcatcttcacatatttccaatgattattcaggaaaagtcttttggtgacttgtgggatgttaaatttaactttcttcttatgttttggctgcatatgtttttccaacagttgctaggggtaatcaaacaaaaacaccaaggattctgcaaaacagaaaagaaaactaaataggagtggtcagagaaataaaagagcctctttatacctgagacataatggtagtgttaggggaggactgaggcatgggagatttggtttttttgaggttacattgtggggatcaggaggggcataaagtttttactgcagtggtaacatctggaaggagtggggtgccttaaagaccgattaggatatttccaggtagaaaagatagagtataaatgtgatggctccccatcccccattctctgagcctaaactttttcttctgttataattggagtccatatctcatttcaatattggtatcaagtgtttgctctttgggataaatccccatctaaaaacaaaagaaattaaaggggaacggaaactgcagaaatgcagaaagtatttcattgctggtttaaactagatgaaagtgtatttttaactacagttccgaaaaatcctagcacccagaataggcttaccttctcctggaattgccagttaccagaaagagtgctttagaatgtcagtatattcaaatgctctaaatctctaaaaaatcttgaaaaaccaaagaaatgcagttgatttttcaaggttacccagagaaatccagtgtccttttcacacactctggttctctgggtgcttttctccccagaatatactgtgttttataaaaattacaagatggaaaaaaaatatacagaagcgtttattttcttgagaaggtaaggaaaataattatatgtgggaacctcttagacttccaaagagtctgtaggaaggctaatgctgttaggaaagggacagctttgttttatagtccctggtatctgttttttagtgtggagggaaatctgcggtttcagagctgtgcttgcaacccatgcagtatatctgacacgctgccctctgggaaaacccgccagtgggggaattgttccagtgatgcagtacagcttgtaacttggaatcccgtcggagaactttgtagttgcttgtcagtcagtgggaagataaaagaggcagcttcttttcaagcaatctgaattcattttcccgtaatgagttagggggtcaggcagcaggagtgagttcacctgagatcttataaagtatatttcctggtggaagaaagagaggaggagaaaagggaacataacgtccaccacgcagctgtagaacggcgtaatgtggcttgtcgttggtctatttctttttatgcccacatattctgatttcagagcatatatttttagaaagaaaggtcaaagaaagtacagctttatctcatttaaaaatataaaacccaatctgtgaaaattgaaacccagttaaagtctaaagcagcaagtgatagtgtttcatacacaaatactcatcaagcaacaacatgttaaagatattgtactatgtcttctgacattacatcattattaaccacacaatttattttagagacttagaagaaattaaatgagtgtcatgataaggagttcttttagttacagacaacagccccagacctctcttcctgaccatttcagatgttgtttctaaatcagcacaaaagatattaggaataaaaactgtgggagaatgttcttatggtcaaagcaagtattaatataaaaaacattgggaatgtaggggaaatagagaaaattactctgtttctatttgtttggaagcaaatgtctcttatgcaaaaaagaaagtatagttattatatctttctgtaagtttccaacacatttctggatgtataaatacatacaaatctaaacacttgggaaatcaaaaggcattttttctggactacaaattatggccatattgttaatgaaaatataaacgggcaataataagatatctgtcatttcaaatattgggctatagaatgtatatgcactgaatgtattgacacttctgattgtatatcatgtcatggccaataaagctatagaaatgtttaattaggacatattcttccacaagaatggagttaagcattaatttatcaaacttgtttaagacctcatctgttctcaacactcacacagcagcttattgaatttgtctgatatctaattggctattttcttgacataatgaacaagtgcatactctatgctgttgtgtctgttgaggcggcgatgtaatgatgaaatggaaattgtaaccatgggtcgtacactgattcaggatatgcagcccacagagccatgagagggcacaggatttcattgtcctcatggcttaactttatgtttcaaactctgcagagcatctctgtggaggaatctctccattctaactcctcatgaaaggagcctgttagaagcaaaatacaatcagcagatcacccagatgatgtacctttggctttggaaggctttgcataatttaaaaaataaaataaaattctcctatttagagaaatttttaaagcatttaaaaatactcacaccattttcaaacccacaccacaagtgatttgggggatttctaatacatgcatgataaagttcaactggataagccagccgtggggcagatatataatgtttacctatagttgtgtaccactgatatgcctgtctagtgttggtttttgcatgctttgttgtggcaagagttcagtgcttgttgaataaatagtaatattagaatcagtgtttagattttggtagactgaacatatagccattttacctaggaggttctcagtaggaaagtgtcagctgtgaattgatgttagagggaaacagaagaatggattacacagagaaatagaaaaaaaatctagccatctggggccaatgtccttctctagcctctaagacacaccctacagcaaggaattcccttctctgattcctgaacttctcctgtgggaatctagggatcaacttccttggatggtgatgggtccttatcattatacagagttatgaggattacaaaccatatgtttggccccttagaaagtgataataggtgactcctaaatcatagttctatataccaagaacagcccacatcaaacatatttcccaaatttttgtgtgaaattcttcataatcaatgtgttactttactcaattattagtgttgcagaatctaaggattctagtgggctatttatgaaaaaaaaagtatatggcttttagagaatttggattctttatttataaatcgggttgcaaataaaatttatgtttttccttctagcaatatgcctttggggagaagcaaagggagttttacacccaagaagcagaaatcaaaaatcatagaattaaattaagaaatttatttgtttatttggacattcattcatttgttcatgtagaaagcatgtatctagcttgttttatggaacaagacagaaactaaatgatagctgctggagttgagtagagaaattttctctatccagagttgaatcatatgttgttttattgtgctaaatttgttagacatttaaatttatacgaatgatggtgcctgtttctgggatatttattccttcccattgtaaacctatttctccaaatcatcactatgctaacttaatcactatgctttcaacatctgaaacatttagaaagtacttaaatatctggcaagcatggtctgtgtgctgaaggggcttgtggtttaacaaggggagctagaaattacccaagtaatcatatagaaatataaaattacagactttaataattattaaagtaaaagtatatataactaagattttcataataagaagcttaatataaattggagggtcaagaaagtttctttgagctgatgacatttagggtaactgtaacatgactagacaccaactcagaaactagaaagaggattccaaagtgaatggcatttgtaaaggatgtgaggaaggtaaaattgtggtggatttgaggaaatgaaagaaggacattgtagctaggctagggagtgaagaaaagaatggcacagatgagactagaaagttagacaggagctacttcatgcagcagactgttttaaggactttggcataaagtaaaagtgtagttgcaataattacaaaaaattttcaaattttcaattgtttttttttattattattatacttcaagttttagggtacatgtgcacaatgtgcaggttagttacatatgtatacatgtgccatgttggtgtgctgcacccattagctcgtcatttaacactgggtatatctcctaatgctatccctcccccctccccccaccccacaacaggccccagtgtgtgatgttccccttcctgtgtccatgtgttctcattgttcaattcccacctatgagtgagaacatacggtgtttggttttttgtccttgcgatagtttgctgagaatgatggtttccagcttcatctatgtccctacaaagtacatgaactcatcattttttatggctgcatagtattccatggtgtatttgtgccacactttcttaatccagtctatcattgttggacatttgggttggttccaagtctttgctattgtgaatagtgccacaataaacatacgtgtgcatgtgtctttatagcagcatgatttataatcccttgggtatatacccagtaatgggatggctgggtcaaatggtatttctagttctagatccctgaggaatcgccacactgatttccacaatggttgaactagtttacagtcccaccaacagtgtaaaagtgttcctatttctccacatcctctccagcacctgttgtttcctgactttttaatgattgccatcctaactggtgtcagatggtatctcattgtggttttgatttgcatttctctcatggccagtgatgatgagcattttttcatgtgtcctttggctgcataaatgtcttcttttgagaagtgtctgttcatatcctttgcccactttttgatggggttgtttgtttttttcttgtaaatttgttggagttcattgtagattctggatattagccctttgtcagatgagtagattgcaaaaaatttctcccattctgtaggttgcctgttcactctgatggtagtttcttttgctgtgcagaagctctttagtttaattagatcccatttgtcaattatggcttttgttgccattgcttttggtgttttagacatgaagtccttgcccatgcctatgtcctgaatggtattgcctaggttttcttctagggtttttatggttttaggtctaacatttaagtctttaatccatcttgaattgatttttgtataaggtgtaaggaagggatccagtttcagcttctacatatggctagccagttttcccagcaccatttattaaatagggaatcctttccccatttcttgtttttgtcaggtttgccaaagatcagatagttgtagatatgcagcattatttctgagggctctgttccattctattggtctatgtctgttttggtaccagtaccatgctgttttggttactgtagccttgtagtctagtttgaagtcaggtagcgtgatgcctccagctttgttcttttggcttaggattgacttggcaatgcgggctctttttttggttccatatgaactttaaagtagttttttccaattctgtgaagaaagtcgttggtagcttgatggggatggcattgaatctataaattaccttgggcagtatggccattttcacaatattgattcttcctacccatgagcatgcaatgttcttccatttgtttgtatcctcttttatttcattgagcagtggtttgtagttctccttgaagaggtccttcacgtcccttgtaagttggattcctaggtattttattctctttgaagcaattgtgaatgggatttcactcatgatttggctctctgtttgtctgttattggtgtataagaatgcttgtgatttttgcaaagatactcctcgagaagagcaactccaagacacataattgtcagattcaccaaagttgaaatgaaggaaaaaatgttaagggcagccatagagaaaggtcgggttacccacaaagggaagcccatcagactaacagctgatctgtcggcagaaactctgcaagccagaacagagtgggggccaatattcaacattcttaaagaaaagaatttttaacccagaatttcatatccagccaaactaagcttcataagtgaaggagaaaaaaaatactttacagacaagcaaatgctgagagattttgtcaccaccacacctgccctaaaagagctcctgaaggaagcattcaacatggaaaggaacaaccagtaccagccactgcaaaaccatgccaaattgtaaagaccatcgaggctaggaagaaactgcatcaactaacgagcaaaataaccagctaacatcataatgacaggatcacattcacacatagcaatattaagcttaaatgtaaatgggctaaatgctccagttaaaagacacagactggcaaattggataaagattcagacccatcagtgtcctgtattcaggaaacccatctcacgtgcagagacacacataggctcaaaataaagggatggaggaagatctaccaagcaaatggaaaactaaaaaagtcaggggttgcaatcctagtctctgataaaacagactttaaaccaggccgggcgcggtggctcacgcctgtaatcccagcactttgggaggccgaggcgggtggatcatgaggtcaggagatcgagaccatcctggctaacaaggtgaaaccccgtctctactaaaaagacaaaaaattagccgggcgcggtggcgggcgcctgtagtcccagctactcgggaggctgaggcaggagaatggcgtgaacccgggaagcggagcttgcagtgagccgagattgcgccactgcagtccgcagtccagcctgggcgacagagcaagactccgtctcaaaaaataaaaaaaataaaaaataaaaaaaataaaccaacaaagatcaaaagagacaaagaaggccattacagaatggtaaatggatcaattcaacaagaagagctaactatcctacatatatatgcacccaatacaggagcacccagattaataaagcaagtccttagagacctacaaagagacttagactcccacacaataataatgggagactttaacaccccactgtcaacattagacagatcaacgagacagaaagttaacaaggatatccaggaattgaactcagctctgcaccaagcagacctaatagacatctacagaactctccactccaaatcaacagaatatacatcctcttcagcaccacaccacacctattccaaaattgaccacatagttggaagtaaagtactcctcagcaaatgtaaaagaatagaaattataacaaactgtctctcagaccacagtgcaatcaaactagaactcaggattaagaaactcactcaaaaccgctcaactacatggaaactgagcaacctgctcctgaatgactgctgggtacataacgaaatgaaggcagaaataaaaatgttctttgaaaccaatgagaacaaagacacaacataccagaatctctgggacacattcaaagcagtgtgtaaagggaaatttatagcactaaatgcccacaagagaaagcaggaaagatctaaaattgacaccctaacatcacaattaaaagaactagagaagcaagagcaaacacattcaaaagctagcagaaggcaagaaataactaagatcagagtagaaccggaagacatagagacacaaaaaacccttcaaaaaaatcaatgaatccaggagctggtgtcttgaaaagatcaacaaaattgatagatcactagcaagactaataaagaagaaaagagagaagaatcaaatagacgcaataaattttcaattgttacacagttgaatattagttacatttagtagctaaaggcttagattggagtgtcttttttcttcagagacagttttgttaaaatggtaccagttagaccaggtgcaggggctcatgcctgtacccagcagtttgggaggctgaggcgggtggatcacaaggtcaggagttcaagaccagcctgtccaagatggtgaaaccccatttctactaaaaatacaaaaaaaaatattagccggacatggtggtaggagcctgtaatcccagctactcgagaggctgaggcagagaattgattgaacccaggatttggagattgtagtgagccaagatcacgccattgcaccccagcctgggtgacagagcgagactctgtctcagaaaaaaaaaaaaaaaaaaggtagcaattataaatgtgttattggcttgcagtcattttttctatggagatatacatatgtgtattcatgtgtttgcatatataatgtattgagatcttactacaaacacatatcatattttacacatttaacattatatcatgaatgtttcttgtattacacacaaaaaactcataacaagtatttaatattcaataggtacttaatatactatagtatagatgtgccaacatgtatttatcaattccttattgttggatatttaggttttttattcttactatttgaaagaatatttattgttaacacatacttctacatttttccttaatatgtataacaacaaaggaattgctaaattaaaggttgagtatatttttgaagacacttgatatgcatggcaaaatgctttcaaaaaaattacatcatttcacatggcttctaatagtatacaaatgtgttcatctgtctgtagttatatgcatttgatagataaaaatggtaggttgctctaatttgcatttcttttattcctattgagaccaaacattttccatatgttcttttcctatttgtttgtctttctttttttgtctgctcacacactttgcccagaatattttagaggttttaaaatttgttttggtatttatggaagctaaaataatatagatagtaattcttagtcattacaattttaaatattttatctgatttatctttttggtctttttatgaggtttatgatgtagtacttcagatttttgataattaaatctttgctaatttatttttataaaaaatattttctccgtctacagttgaaacatatgttgctttattttgctaaatttatcagacttaaatttgtatacatgatgctgcctgtttctgagctatttatttcttctccttttacctgtttctaatctgattgaattgtggtgctttcaacatcttaattatttagaaaatacatttgtatcttatgggtaaagtcattattttctcccttcaggttattattcatttctgttaaaaggtcttagttcttttcatatgcatattcttccagttgaacattagattgagttgaaaaaatgacagcaatatttttaatggagtctccttcttatacattaattcttctgaaacttacatcttaaaatatttctcatctagaaatgtgttatttttccatttacttaagcagcttgtatctccattaaagttttgttattttccccataaggacctcacattttttgttagggttattccaggtatttttacttttgtgatggtgttcatttatttttattataatatttaaaaaatctctggtattacgtcagtgtttttaaaacatgccatttttattcaatactttaaaaatatttataaatctctgagttggcaatttctccagctctaggaagacagaaaatacacagatctgtacactcaaagaacgtgagtccagcccactcagtcatatgaacttagctggatataacacgttaacagacaggatagacatttttaccttgaacagaaagagctgtaattcaagttctgtgtcacagatacaatccgtacattatggtttctttaaataagccataaccaattttttttagtaattatttgcttccagttattcatgtgagattattaaaataagcttatgaagtaaatataagatgtttcaaatattcctatccattgagaaccccagaaattatccttattgaaatttttagaaaaaaattagataggtgcacaggaaaatccttataaaattatgtccctgacagagtttatatgtataataaaaatcaagagggtgggtgtttctaaatattcaactatatggattgaaggcattgtggtaaatccattacaaagattatactgtatatttgttgatgagaaaatatatattcttacagctataaaacaatgagcatcataaaattctatgattgcaatatatgacagtagatcatatatgtatagatgtatgtccatatatacgtgtgtgtgtgtgtgtgtgtgtatatatatatatatatatctgaacaaatatgaaggacacacaccaaaatataccaaaatattaataacaatgattatcttcacattttaggtaatttcagcttttctctttatggttgctgatatagccttaacatttataataaaaaaaaattcttttgtagttagacaaagaagaaatatgtgaagccaaaataggaaaacatgggggaaggaaggactttatatcatgtttcatctcatagcaaaactattggaagcatttcagaaacaaaagaccttaaaacttcaaactctaataagaaattgggaacaaaaatcttgagattgttatacaagagatgttaaagaccttaggcctcagtttctttcagaagcccagcaattgcaattattatttattatcactttacttttgcttgaatctctttagctaaaggtggtttacttccacttttccctaataatttatgtcttcatgataatagattttcttattatctttctgatttgtacctgtttcctatttaatgatttactctgtatggcatacatgccaaagttatcatgctagaaaaattattatgctataataattatgataccatcaaactgaattaaattatgtttcattgtaaatagtaaaatgtattaatttttttaaaagcttttttatgccagcggagataaataaagttacctttatgtactttcattaaacacaatgacagtacaagccaaactgataacaaatcaacgcactccttcttgtaacactcctaagttgttctgaaatcagctttcttaggactatgaattcaatgcaatgtattaaacagaatctgtgccttctgtgaataaaagtttcacctccatctcttgtgagtatatgtaggcagatctttgaacaatgaggttttcttccattgatttaaaatgaaaatgaacctggattttaaatgtgcattctaattgtccctttagcacatcagaacagcactgcctaatagaaatataatgtgagctacatatataattttgaattttctaaaatgcacattttaaaaaagtaaaatgaaacagttaaaactaatttagtagggcttggtgcggtggcttacacctgtgatcccagcattttgggaggctgagggtggcagaccacctgaagtcaggagtttgagaccagtctgggtgacatggcgaaaccctgtctctactaaaaatacaaaaattagccaggagtggtggtgcatgcctgtagtctctcagctactcaggaggctggggtgggagaatcacttgaacgtgagaggcggagtttgcagtgagccaagatcacaccactgcactccagtctgggcgacagagtgacttagtctcagttaaaaaaaaaaaaaaagtaatataccttatttaatacaatctatctaaaatatcattattttaacatgtaattaaaacctaaaagttaatgagataatacattattttttctaccaaatctatgtctgtattttacacttataggatatttcaatttagattttttatcagatatattcagtctgcatttagatgtcataagttttcagttgagaaagtagatccacataccaaattgtttcaaatgtatttaaaagttttccagtaactgaatcaatgatcaatttttaatttaaattcattaaaatcaaattagaaattcagctcctcagccatactacccacatttcaagtgctcaatagccatatgtggataggggctattgtattggacagcaaaggtttagaacacatgtataagatgttaacacagaggaaaagttaaaagttaaatcaatgccaaactattgggaatgttttgtctaccgggtttcaagaaataatgacatgactgatatttttcttattgaatcagctgctcggctggttggctcaactaatagagtcaaacagttgctgggttttataaacaaatcatctccttttttatttggtcctccaattttcttaaggcaaatatttgtgccaaattatgccaaagtctgtctctcctgaatatccctgttatcctcgaatattgttgagtgtcccatgaatataactgttaaatgctgttttgagttaaaaccaagaacacctatattgagaaaaaaattaaatgtagttaatgttgtaccaccatgttttgttctagcttctcaactgtctcatgtaaataagcacaataaacatctactgagtgattctgtaatagtttggatctataggtccatcatttgtgatgacacatagaagttggcccaggaaagctaaaagtatgtcatatgtcaaataatgccttccaccaagtttagagcagcatttcttccccagcattacaacttcatgtaatggcacttggcagtattggcatttctgatatgacttcttttggctagttcagaattcttaaaaaataaatagtttttcaccctgtgattgaaagggttaaatagtaccaattcattacactcacaaaaggatttattttgttctcataaatcagttttattccacatttttattattcccttgggtgagctactccaattgaaatcaatacaagtgcaagtgagacaatcaatctcgatatttgattatggattggagattcccaggtccgctttttagccagtttctttctgatcatctcccccaaagaactgaatatttttattgacatctatgagttctgaacatgtttagaaagaagataataatcttcatttgtatactgacaatggaagccccacaaatgaacaaggattaaaaaataaagacttaaaatatgtagctataacatcatcagcaaacttcaaatttctcaatatttttcttaagatgtagtcatgttttaaaataactttattctttcttttaaaaaaagacctgttaatacaactggtggctacaaaccacattcttagggtgctattaggtaaatgattatttttcatgacaaagatattatttattttcacatgcttgtttcagagctgaaccatatcaactggtctaggttaacaataagaaaacagttaaggtgaataaaatgcctttgaaggtatccagcctaggtcttttcatttctataattgtccaggctggaaagccaccatctgggggatttaaaagagaaaaacagctcaactttaaattagagagcaaaattgattaagttgttcctcaatgaggccaacatttatatatcaaactctctttgctttacaaacaaatttatatcttatgatcctttacatatcgaatgcttattttgggactcatggtaccatattattgttctcttgcctctgactctagccacctgttctaggttcttaagcaaaatttttgaaaaggcacaattaaacctttccgtaattcattatttgatacttagaataaggcaattatttgatgcacttatctaatcatattcttaaaataaatttcaaggtaatattaacactgcatttgttactttcagcaaacattttagccttatttagccatttactaattttcactagaatccattggaaggggatgtttcatgttttggacaaattacctaccactgattttttttcaggaagacatataactttgaatgttgtaaaaaagtattttagaaggagttaaaatagtaaacccatatttctttcatttaagcaacattaattactcttcagttactcttattaagcctttagaatagcagctgtataagccatataagccaggcacttggatttccactggcaaacttcctaggcatgtggaattaggggactgtctagaacttatttttgtccagcttcatttccttttcagtaatttgcatttattaatgctgaataatgaaagataatcaaaacattaatgaaggtatggtgcagtgatgtaacaaagggctatatcaacaaaatattctttccacgtgctttgttccactctttaaaaaaaatatttactcaagagaatcattctagaaactggaaattgctccctttattcaggaaggcagtatattttttaaaagttagcttctttaattgtttaattcagaggttggcaaatcttttctataaagggatagaaagtaaacactttagactttgcaggcaatatagtctctgccataattactcaattctgcagttatatcatgaaaattcctagaaagataattacttttgttctaataagcctttatttacaaaaataggcagctggccaaatttggcttgtagattgtagtttgtgggaccctgttttattataactcgtttatacattaaaatgcaatttacatactttccttggatatttcaatcttctcatgattcatttgattttgcaaaaattatgaatgctaatttaaaaatctatgtaatacagaaaaacaacatccactaaaatcccactacccataaataaccaatgttaacaaacagtaaacattattttagagctgtctcaattcatgggtgattcttggtagcaaacaacagaaacaaatttggttaattcaggcagagatgaattatattaaaggaattcaacagttcaaaaagttgtcaggaaagctggagagtcagacttgtggagaaccacaaataacatagcccagaccagcttatgccttcttaggacacccccactggcaccatcaccattcagtcgccttggaaaattatcactctacttctggattctcaacaattttagaggcatcttgaataatccttagttgactgtgagccattgtttcactggatcaagctttgtagtccccagatgaaagcaatgcaactgactggcagtcccatggtcttaccacatgaacttcaggtgtcctttcatttacaaaaaaagagaaaattaagttatgtttctaatcatttctttctacatacctattatcttctccctgattgttagagtttcttgatctttttacttatgcattaattatgattctctcaaggcttttcatcataccattgatttagattttagctctattctgttcctggctttttctaacttgtttattaaatacttactgcattttttaatttccagattgtttctctgtctctgcaatatcattttatcatattatagggaatatatatcattttttcccaaactacatggttattttgtctttttatgttacaatcctttctttagctgtatgtataatactcgatatattatttttttcttcaacttcatcttgcttatgccttgtatgggcagctctgtccagattttgcactggttctgagcttggtctacttcctttcctttctggtgctagtcagtcttctttcgacctaaattttgagcactaggtgttgctagagggtgcgaagatgcactgggcagaattctggggaatccagattttctgtctcctctgagatcctattatatagcttttgtggcagcacttgctgcatttattcacatgtatctcccacacctgggaacaccagctttttcccccaactcagcacagtgcttggcaggatggccagccctgatttctcttcctgtctctgcagactctactcagttcatttctctacatattggagaggattttttttggcttatactccttcctctgggaacaaagttaggagctgcgctatactaagaaggaatttaccatctctttcttcttttaggtttcaaaattcatgtcggtcatttttttccttttcctttatacatttgtacctggagaatcttcaactaaaattgttaatgttactgttttcatagtttgtttccattctgtcaggtattttggaaagacagttgtgtggtaccacttaatttagaagctgtgaaagttcacaatttgtccaaaatctctttctagcaaggtgattcatatatacagttcagagactaacagggagactgtaaggtggcatctgactttccccacctcctggtgttcatgtccttgtttactctccttcccttgggtgtcttcaaaacctgtgacttgctgctcaccagtagaacagaacaaaggtgatagcatgccacctccataagattgtaacctgtcttgctagaagactccctctttttgatacagcaagtggtcacactggggaggcccatatgggaagaaatgagggtgaacgccaggcaacacaaaactggtaactgagagcagccttgagtcaatagccagaaaaaattgagaccctcagtctcgacagcctacaacaaattgaaaactatcaacaaccacctgagcttgcgagagatccttcctcattggaaccttcagatgggatttcagtcctggccaacaccttgactgcagtcttttgagaccctgagcacaggacccagttagctgtgccagactcctgactcacagaaactatgagattctaaatgtatgttgctaagttcgtggtgataccatgacacatcgataggtaactaacacaggaacaccttactgtgtgactgtagcaaatgaaacaggtagaattcaacagcaaaacatgatatcattctcatccagacccccaagtcgttgctcttcttttacagaggaaccatctcaagtatatatcttccagtaattagaagaaaatgttaaacatgtcattaaacaaagaatggaccataggctttgtctgggatcaataatggttgtcaaattacttgtctgatcctagtagcaccacaggctcagcaggttcagcatggttagtaaggctctaccagaactttaaaaggaaacacgttttggtgataaaatagttgtattcatgtccagtgtttagtgtggaagccggagaccactttctatgagagtatatttgttcaataacttttagctgattgagataacagcatcagtttgttcagctggaaaaaagtttgcccaaatggcaaaaaaaataagtcaaagtggaaaaaaaccctgacatttcagagcatatatggttagtaaaaatagaccatacttctacaatttacaatagtcacagtacatctctgaatttactctctctctctttctgtgtgtttatatacatatatatagtgaactgtactgaattttatatatcgtagtgaactttatatataaaatgtataatatacatgcatatatacatatatctttcatttttataactatttttagagcagttttaggattacagcaatattaagcataaggtacagagatttttgtctatcctttatgcattatagttcctttctgatattcataaaatgagatacatttaggaaaatctgactgtggtacatagagagagcttgatggggaaaaataaaacatgcttcaacaaactttaaaaaataatttgcgatatttagaacagtaattgtgcctacacgttaaaaaagatctagagaacaaaacataaagattctcgatatctatagagttgtcattgctcttgtatgggcacaaccaggacaaatgtgtctgaagcatcttttggtgagttgataaaatagtgcatgtatttattccctgcactacaattgtcaggctagaggaatgaccaatttaaagaggagtcaaagaagtacagctttgactagatgacaactaattaaaatcactattacagtaattacagtaatgtaagaaatatgatgcattaatcgagcaccgtcctcagaaggtcttagtggttcataggctatttatttctctttcaaaatatcctgtggagaagacagcttcgtaggcatatgtccataaatattttatacattgtcaaaaacttaaggccaggaatagatttctttcaccatatattaattacaaaataaacaaatactcagcacctttcagattcctaccaacatgagatctatcagaaaaatggaatctggaagaaacacttgctttttggttaaaataatttaaaataatatttttagaaggaataaataaatgtaacttaaatattaatacagggtatatagagagacctgaaattcttggctcacagtaaaggctgattttgccagtttaccttgatcacaattcagtgtcttctgattttggtattggcagaatttcgtgatagtgagatggaactgaacaactctaaaattgagaccttaataccagaaaaatatagtatttctttgtacagcaagaagtgggaaaaattagttaataccttttctaccttaaggtgtaattggattcagaaaaagactaacttaaagcaggaccaggcctgacatataaaatcctcacgaggtaacaagaatcagtttggtttgttcactgtcatttctcattataatctttgtcatgagaatggattcatgttgtgccattttctgttcctgttacaatctttgtcacatgaataagatatcaggatgttaatgcctggcatacagtattgtgtgtgttatgatactgtacaggactacgctgacctttgcaatattatgtattctgattggttgttcatgtcacctctttcccacaagttaataaggctgtaaaaaggagagaactgaaatggccagccagtcaaattatagaatattgaaaaggtcagagcagtccagcacagagaaaaaaaaattatggaatatatggtgcattaaaattcttgtgacaatgattgtaacaagaataggaaaggatacccatttatgttattccaatctagagaaccccataggatggtattctcgagacagcaatcatttacgcatccctgagtcatacatgtgaaaatatccatttatgctgttttttccttaaaaataattgcatagattttctactattcaacaaaaaagagcattgaaaataagattttcatctcagaaaaggggcattaatattgttaacatttcagttaagactttatatttgagactaaagaaaaggtttttttataagtaaaacctgttgttcatatgagatttatttggtctattttttcatgtaacacttttctttgaaataaaataggagagtaggactgaatgaattaacctttttcaagaccctttagaatgtgggatagaccgaaagagcagttaggagtttatgtagaaattctacatgatctatgcaaaacttattttatctttatgatgtgtgatgttggccaatacacaaaaaatcttttcttcctctgcatcttcagtggaaagatagtgacagagagaaagaggtataatacttaaatcagaaaccctgatgttattgttcttaagtgtgcaataattacttatttttcaaattgtttttatgcatattttaaattttcttgtagaacaacttcattggattttgtagcctataaggagacatctgttttaaaccttagctttacacttatttcactaatagagtaaacatgttatagtccaaagctagtcaaagctagtgatcccagcaccctatgctctgatgctcatccagtaggcctggcgtagaattcagatatatgaatgtttatgaggtaaccccaagtgattttgatgtaggttgtgcctggaatattggtattggcaacctcattttgcaaagagctaagtgagacccccagttaaagcccaatggctcagaccaagccacagagggtggaggagggcaactcaacttcaaatcacagtgcttgggtgggggcgaagcaggcagtggggagttgcggttccagaactcagaagcttaaaaggtcttgcaccatccacttatactcacaaatagggtcagattggagggccaaccagacaggaatggtcgcctgcgataggacacacttatcactttcacattttcaagcttgatttttgaggctgaaccaacgaggctgcattttccagcccactgaaagcccagtttatgcagtgaaaagtggcaaagcacaaccatctcaacaagaggaacctgagcacaagcattttaaaaatctacccctccccgcccatattgaggagcccaaattcctaaagttcaaaggaagaaaggaaagacagtgagagtgaaatggaggaagagctaaaatctgtggatcctgctttggttttgaatctggaaatttttgagcttcattgagggctgaaatcctgtcagttactctaggtctgtgaattgaactgtatgtttgtaggggtgagagaacattagactcactcagctgtatagttactggagatgtacaagttcttttttgagctgagcaaaatggttatgtaattgcatacttctcataattattgagtaattatatacttcttataattactgagtaatcattgttctataactagaacttaatgttacaactaattatataattaccatgtattaatgttgttatctaggaagcttagaatgaagtgctacttatatatctccccctgccatgccattttcaaagcaagcagtagtgtttgttttttgtttgttttacagttcaaaatttccttaaaaaacaaacaaacaagcaaaatgcaatggaaaaaacttcaccaatattatactcatacatatttactcattgattttgtatttgtccctggctgaaaatttgtaaaattatattctcatggcttaattttagaatttccattgttgctttacaaatttcaatcttttataagacctgcacagttacgctacttgagagtcaattgaatatctgcttgagtctataggacaagctgacctttttgaaagtttacaattgagcatgtaatgacagcagaaatacttccaaggagctcaatatcatggggacaggaggagatctccccatgctgaccatgtaattgttcttaggcaatggttaggatggtcatatttaatcttaaccaggtttcttgagtgcaagaattatgtcttatgtacttggggcatgttctcgtcagtgcctagaaaagccttctccttgcatgcagttggagctcaataatcttcagtagaagcaagctgactagttgtaaagaacctaggaaagctaaaatggcataaattggaaatgtctttttagtgcataatgaaattatcaaaggctgctttgtaggtttcataatgtcttgctaataagtattacacatatagaggagtgcattatctacttacattttaggaccttgaaatcattctttaagctatgaatatgtctttatctgcctttactgaaagtgaatagaaattatcattgtcacgttttagcccacaagcactgtttatttcctttgaagtaaactacttatttggatgtgccaattttgggtccagagtaataaattatattatgccattagggctttcttctgctcatgaaaaaaactcctgagtattttgtaacagtagatttttcagtgacttcctccatccctaaatggttataagtatctttttaaataactttttgtatgtttttacaatttgttggacctacccatatttcatgaaaatagtcaagtaataaccagatatcagaccctcttttgcattatttgatcttcattaatttcagtttgaaatataatctgatgggacaatgacacattggtaatggatgagattagtgctgctttattcattgaaaaaccttagaattttgatgaataatacattgttaggttggaaggggtagagaataggtaggtaattgctactgagaaaatgaaatacagagtacaaaattcttaatcacttgctagttctgaatggctagaatgtatcagttgtatggattacaacaaaaacaataacatcattcctagctgttgtttatgagcaactattatgtgctggatatgataaagaaataatctcacttaattttcacaatagcactgcaatgtaaatactgtattatcattcccagttcacagatgaagaaccagacattcagaaatattaagtaaattagcaaagagcacattgctaaagaatacaagaacaagttcaaatgcaggacttttgacaaccaaatttatgttctttcctttgcactatactttgctactaaactgtgttaaaatataatgtttttgtaaatattgtaaaccttgcattttgtatactatacgatgcaagatcacttttagtatgatgccatcttttactttttaagcatttgttcaataaagattatatcagtatctggagatcttgccagtatgcttgttcttctctttgaagctcaatatcatgtgttttttaattcatttgtctatatctgcagaatttgtgtgtgaaagattgaatgtacatataataaaaagtggttttatataggaaaaaggttatttgaagtaaatattggtgctcttttagataaaaaaatctcactctgtgacccaagctggagtgcagtgacacaattatagttcactgtaatctcaaatttgtgggttcaagtgattctcccacctcagcctcctgagtagctagaactacaggctcataccaccatgaccagataatttttaattttaattttttgtttttagagatgaggacttgctatgttgcctagcctgggtggtactcttaatcattcatttttctgttttttaagagttattgtatcatttctaaaagtgacaaacattaagcagcatttaaaaaattgtctcataaatttttcaggaaagcatctaatatagaaaatgttacaattttcatctgtagcccttttcttattttaaccctaattttttactcttaacctgaaatttaacctaatggtgtaagagagagagataaaacactgttactaggcagaagtattttcctgcattttggactgatgagatttaagaatgggtttgctaaagctttggaaggacagtggtgttgggaccagggtgaggatgtattaaaagtgattcttttatatagctaggcagcttctgcattttctcataaagctaaaaatattagatcttctgatcaaagtggacatatagtacctcccatccccagttgcttttcaagatattctgactaattgaaatttaaaagggcattagatagaaagaaatccacccacatttcaagcaaagtgaacagaaaacacctcagtttgtgaaatatacaatatctgacaaatatgtctgagtataatacgtatatccagaacaattctatttgaggaataatgtgttatttcttcctgtctgcacatccaaaaaaattcagggatttttattggaaaaaaaaccctcaaaaaagtataaacaactcatcaagtaatcaatttctacatttgtgcaatacttttacttatatgcttgatacttgtgatatggctttatcctacagttatctaagaatattcatcaaattatttcgattgccgtgatgaatgaattggccaggtcaactcagatagcacttttgttcacaagataataaaatccaaatatgtgcattgatagaagcacatgtaatgcctcttagagtggtaaagttacagacctatttggtacagtatatttagaaactcaagaaaatactcaaataatagcaggaatgaattcttaaatatgtatttattttaataattttcttttttaatcagtaggtaataactacacccttctgaatgtcacaaaagtcatgtacagcggagaagagacaaacctttgggtgctcatcgatgggctggttccttttaccaactatactgtacaagtgaatatttcaaatagccaaggcagcttgataactgatcctataacaattgcaatgcctccaggaggtaagtctatgcaaatgttggctatctaattttatataaatgccctagaattaagtttccattgaataccttgtttatttttagaggtattttattttagaacttagaggctcaattgtatttctggttcttttaatagttgttgttttgctttgtttattcagattctttaattgacgatcttttattgttttgttgagactgctttcatccacctcacactgtgtgtatgtgtgtgtatataccatacacacatacacacacacacatatatatatctggatttctgcatgttaagaaaattgggaaatgattttgttcaaggcgttacttaaagccaaaatttatatttgcaatttgagcttccattttctactgcaaatggttctcattcctggtgttctaaataactagttcaattgtatacttaaagtacttcatttggcaaaaagggcagggtgcagatgatagaataggaaaattccatttgcactactggaaaacacctttaaattcctgatcctaataattacagttcagcagggccacattcatgtgtgaaatgtgatacagtctgcatatttttattttaaatatttctataaaaatcgacctattcacaattaccattattttgatgtgccttcagcttcaccatgttttaactcgttgcgggaaataatcgcattgaggaaaacccctctagggttgacatggatggcccttgaacagaaagcatgcctcaaaatgttaagagcatgactctcaattgagtgctaaagaatgtgtgttttctgaaaatcctgaaggcaaaggaccccaggacatccagcatctgccctgtagcccatctcccaggaatgagtatattctgaactaagggagaatgtcacaatcttttatcagcaatccgaagggcaggttaaccccacttccagttatgaagagtataagaacacaaagtgctttatcactggagaaaaataaaagggaatcttcagtttgtatggaaccgctcccctgcaaaaaagattcattacttgttgtatcataaaaccacacactattatctaccttttatgccattattaaaattaatgaattgatgtttactaaaatacttgaaactgtaaatgtcagaagctacattacttaagaaaagaatgcataaaagaaacttttgaggctgatcaactcaggttagtatcatatttattgagacaataattttaaaagggaattgaatttagatatatttatttaaaaattgagactgaaacccaaaataaaacaaactccccccgctaaaataaaccttaggtattcatatcttcatttttcacttcaatacacatgctaggaaggatagaaaactgtgatggctctaaaccttagaatataatatcctttactcaaatttagaaattaaagagtaatcagtgccataatggaggttttaagttatatagtaataccttttctacaggatatatacaatatttaataagcgtgtttattttagggtatttatactgattaaatagtttgtgatttacagtaatttatatcatattcataaaatagggcaaatttaattcattgtttatgtttttaggaatgtatggtctaataatttgttatttatacatatatcaagattcaattaaaaatagcaaggtcctactgctaacggaatatgcgctatgtgaatatacctgtcagtaaaagggttaatattatacaaatagaaagaaactaaaatattgttttatagtggtgcagtcaaactgagtaaaccattaactgaggcttatcttcatctttgctctgtggatgcttatctgtgtcattaccataatgcactgcaggcccacactctctgggcctgatgcaatcctccactttatgtattcagaaatctagaatttgggagtcagtccttcaccaaagaggaagcaaatgtcttcaaagacagacagtgattcgctaaagtttattatggccattaggacatactttcttttttcattagattgttgttgattacaattaggaaacgtatagctttaaaattatcttttttatgaccttgtggcagtttaaaggtgatacctcattgattaaataggttttagttcatgcttccttttacttaatgatctgaaaacatattatcctgatttacacataaaaatcatgctgaaaagcatgtggcattcactagaatatgtgtgtttaagtagaattaaattagtactgagagttattaaagaaatcttccatgcctttgtccagtgaactgtgtttcattctgaaatgaataataaatggaccaatatacggaggcaaaccaacttatgggcagagaaggttctatatgctatttacttttccattatagttggattgttatcattattgccatttccttgatttcaatattagatctctcttatggtgatgttgaattcctagtatctttcaatgctgggtgatgcaagatttgtgatgataatatccttagctatgcttcttttgcatacttttaaaacataataagaaaagagttgggcaaaataaaatgctcttttttacttcatcaaatatttgctatcaaatatgacctggaaaatcccctttacccgtttaatctggccaaatcctactcattttttagcctcaaacctagaaattggtctatcagaaagtcatgttttgccaacagaggctgagatagggcctttctgtatcccagagaacagttacattatactgaaattgcctgtttaatctgtcacaatcactggttataagatcctatagagtaggaactgtttcttactcacatttctatcttcagcacctagactaaacctgacacatggtaggtgcataatgaataattggtgaatgaataaattagtcaagattgcttaacgacttgttttaaattttaagcttattattactcaggccctccaggcctcatctcaacctcagcaaccttgtattttagccagctgtgaaagagaccttctctgtacaccactgtccaatgtaggaatgctctggttatgtagataaaattgggagctcaaactgtaaggagggtgagtgtattggaggtgagaaatattctcaagttatgccaactcttcattcttttattcttccctatagtggttacttttctcaggtgagcatagaataaacaatccttagtttagatagtaatttggaaaggagaggtgaaagggtcatactccaaagaattttaccaggatacatcatctcttaatttgtagtcaggacacatcttatttgccagtcctacctctatttttctgatgagaaaaaatatataattaagaatatgataaacacaagttatttgaagatagaaattaaagtaagaagatggtgctactaataacttggcacatagatgaacagtggcaaatcccaattaacacacattttttatttgaaaaattcactttaaatattatttggacaactggaggggcgtctctgttttttccaattatgtagcagatccttccctacttctgcacactcaagttttttgtatttctacaattactatatttttaggttgtttgtaataacataatgctcatatttagcactaaggtattcttggaaataaaggatatatttaatcagagctcttgaatagtattatggtacaggttcaagagttctaggaaaagaattaaaaaaataaaaacgaatccaaatgttaatccataaatatgaaactttcctatggcctttaccccttcaaggtctggagttactaatggggttaggatttcaacgcttaatggggctcagtgcattagtgttttgtatgcatggaattcagcattcagtttaataagtggttgacattggtgatgtcccttaatttgcttaaatctaattggctcttttatcagtcaaacctgtatggattggcaattgatcagaaagggtcagccatgactctgcatgtagttaaatgatggaagcaccagttaaagtcacagttgcatgataataagcaaaagaagaacaaatgagcttagaggaggaaggcaaagaagcttagaagttttgcaggatcttcaagttcagaacaaaggcattatagagtatataaattttaaatacactgcattttgcctccagacttaaacctttttttttccagatgaactgaaatcttgtctgaaactgtctttgttacatcaaagaactactcagaaagctaaaagagacagaagaagcataaaagggcatagtttaaaatgattagtgacaaattccatactgacgagctagaaacagatttttaatgaaagttttatattattccaaaaggaataattctgtttatctttttctgaactgctttattgtaacagtgaaaggaacttggagccaccctggtttgtgaacctaatccaattttcctctgagagtaaataatttgtcatttgtacttttaagttgatgagaattattataatctacaaacagtgtaaaatactaggcttgagaaaatctgtttatttgcccaaatgtgttattagagaaccaaaaattgaaaaaggcaaaatggttgcgagtagtttgttttacagggtcttttcgactctctctccttcccctgaaccccctctccacttatccacctaaaatatcaatgagaaaaaaaagaaagaaagaaaaccattaggaagtaaaacttaggcacatcgcaaaagcatagacgttggagtcctagaaacaaggatttaaatccacctctttcactcactgcttgagtgactatgagcaaatctgcagatataactgagcttcagtttgctcatccattaaagaggctggatggtaattcccacctgactggaggattgaacaacatattatatgtaatgtgtttagcgcattgcctgtcttggtaaacatttggtgcttcctacctcttttgttctattttcctactaagactctttttggggacctggaaaatgccctatagaaaaagtaagtaaaaaaacctgtctttcacatagactgcagagaccagaataatttcatcttgctacatccctatcctttcctacacttaccccttaacatgttgacatacatatggccaggccagtaaccctgctaaggggtggttgtgatgcatattagatgatgaagtaagcaggaagcatgggaagtgattttctttttgaaataccttcagcatcctcctccatgacctccagatcataatttgcgaagatttttacatcaagctctcattggtcatcttgggatttcacatattttcttaatagaactcttcttctgtgtttatatagagctacttattaaatataattatgactttttaaaaaatgtctattattgtatattttattcacaaatgcttttttttacattgttaatgctagcccaaagcaagtaatttgaaattttatcctaagatgttttcatgttttcttaattgtcctcaaatacatatatttaaaagttacatcttggaattcaaactttttttcatttttcactaaataggaaagtttactagttgttcagccaatatgcttttgaataactaaataaaatgtttgcttttaaaagatgttagtatatgatttttgcccaataataccactaaaggaataatatattaatgactaacttttttagcttgaactactgaattccattctgtttagaatttaagagactggaatattctttcgggtattgctgtgtaacgagtcactccaaaagtcagcaacttaaaacaaccattctgtattatttctcacctgattgtgtgagttgtcagcatggttctcctggcttaaggaggctggactgggcttcttcagaattcccagaaagaaactcagggtttcaagagtcaagccctagtgtacaagccctgaaaacctttgcttgcctcaaactgtccaaagcaaatttcttgcccaagtcaaaaagcatgtatgctggaatgtatgatttactggagcctgataatttgtcaatcttccataaatgtctaagtgattggtttttagattgtgtatgtgtatatgtacaaacacatacatgcaagtattacagatacataatttttcttttaaattagttctgcttttgaaataatgatgtactagcaccaaaaaaaatgaagaaagcagtttactaaatttttccttgaagaagatataaaaaaaaatctttccttacatgacaattaattttgatgttttatttcagtataaagatcaataaatgtatatcaatagattcttgtttaaaatgtttgtagctccctattggagggaaaattctgatctcttcttataagtaggtgatttaaaaaaaaatcttagctatttctcaaatctaggccttgggtattctgatttctgcttgtaactttgaactgtgagagtagaaactgtgtgtaatttgaatattttctgtagctccagtgtctggcataaactatttgctgaataaattaccagagccctttgtggcagtgataacttggaaaataatcctgaaagttatattttgctattgctgtgtcttttacttggataaacattttccagaattaaattcaacatttagggtttaattcatcctaaaattatttttagtcctgttaagattaccataacagtgtaaaaatacataatataggaccctctggaggtatgtttataaatttgtgtgtgtgtttaattgtctattttacctaccattttattttttatttttaaataattccatcttttatattatgtttaggggtacatgtgcaggcttgtcacatggatatattgtatgatgctaaggtttcaggtatgattgatcctattgcccaggtagtgagcagagcacctaatagttttcagttctttgctttctcccactgttccccttctagtagtttccactgtaaccaccattttcaattaacttatctattgtgattggtggttgaacacttaactgaaaataatgattaaaacagaacatccaaaaatttaaatatatattaaacacaactttaatttagaacacataaatatatttatctatatatttatccaacaatcttgttatatagggccaagttgttttcttggagtgttaatttagtatttataagtccagcatatttgctgccaaaactatattcataatgcatagtttgatttccactttgaaaactcctttaaaaggagaacaaaaatttagagataattaaggaagaatctaattatagaatttttcaggcttttgtaatatcctaagtcttttagttatttttcctgaacgaatttcacagtattgttttattaagtcctcactgaaagtttttcaaagcagtaaattttcatagaaaacggtttctgttaacagtgctcatcagtttaagcattatttaattaaatgacataatcataatgacaaccacaattgacatcacaggtttaaaaaatacagctgactctttgtgagtgtataattctacctgcgactgcagaatgttgcccttgaactacagagtagtcaactatccatctctgcaatacagagtaaatgtaaattttttattaatctggcaagtcagataagaataggtaggtaaggctgggcgcggtggctcacgcctgtaatcccagcacttcggaaggccaaggagggtggatcacctgaggttgggagttcgagaccagcctgaccaacatagagaaaccccatcgctaccaaaaatacaaaaacttagccgggcatgttgtaattccagctattcgggaggctggggtaggagaatcgcttgaacccgaaaggcggaggttacagagagccaagattgtaccattgcactccagcctgggcaacaagagcaaaactctgtctcaaaaaaaaaaaaaaaaaaaagataggtaggtaaagcaagtgtctactatttaggaaaaagacacgcttccaaagtggcagaatgatccaccctcagagcagcctacccaagtaggagaggcaggacaatgctaccaaattcttctcttaggttaagcattaccacagctctgccttaaaagaaaaaagaaattattgattatatcccttcaattgattagggactgagtctgagatttgtggcataacttgctcagtgaacttatttttctccttcagtttttaaaggaaagaactgagctttctcttctattttcaaatttcaaccaaaatctctttctaagaccttagagcaatgaaatgtgtgggtagcactatcaaccagccaggtggagaatggtatttttttttttttttttttttttgcagggtctctaagagaattaggggcaactagaactggctcaaaaagcaagaatatacgaaagagcaaaagagtaaataaataagaattgcaaaaacaaactctattgtatcttgcactttcttcatgcattgtagcactgagaattgtaaaatatttctataccttttgtttgtttttgttcttgtttttttgagacggagtctcgctctgtcacccaggctggagtgcagtggcgcaatctcagctcactctatgccttttaaaatcaacttagtacaatgtcaagatgctactttttaaaaataaaactaatggttctcaaaaatgtgaaagcttgcttgccgagtacagatataaagctcctcaatatgtgttttccatttttcatctgctctgtatccacttagatttatttgaaatatataaatagaaacattaatgtgcaggtggcaatgggatatcttaaaaattgaaagagtacaaagggatggagattttaaaaataaacgtaggttagcagctgaaataagcaataggctaagatggtatattcccttattcagagggtagaaggaaagatgagattaactgctttttataatgtaaaagccacaatgaagatacaggatggtgaggaatagcattctttaaaacgacaacattctaccacataaacagatggtttgtctttaccttcagtatattaaaagctacacaatttatattacatccagttcatatgaatctttcgaatagttgtgcataatgttttacttctgtgtatatcttccaaatgtgctgctattttttccctggaaaaatcaacccattgaaagtaataaagtaggagaattcaacaaataaaaagtatttaaattcttaataaaataaatagtgtgctttcaaaaacacataccaggccatttaatttaacccatgctttctcccaggtacgagaatagaaccaaaggatttatgactgtcttaaacatgctctcaaatcctttcctgaaaagtgttacctttacttttttggaattgatagtttaacctgctttgtgtgtgtgtgtgcatgtatgaagaggtatatgtttgtaatattacatatcataagccaaagagagggataaattcctgtttcataatttgtgaacaattttttcactttttgtattcaccatcttgacaatgaacttcctgcttataaaaacaccttagaaaaagactaacttctgagctatggagaagagggaaggaaactttgaagtgtgcttactatggactcaacaagcctccagcaaagggctgccagctctccatatttgcatactctcatgtggattatatagaaatacacacgcccacacacacaattaagtgctatctttaaagcatcctggggcaagagagagagacttaaaaaaataaaataaaatcacatctttttcttttttaccaggggagaggggtgggaaatattgttcctttaagttccattgatattttctaactcacatttttaaaaagaataagtacaattcattttctttttttttcttcgaagacggctttatccataactttaagcttaaaaaaaaaaatcatgtctgtctgactgacactgcagtctaaaagcaacttgaagttttatttgaatttttatagtgccctaaagaaatttttgctttatttctttaaaataatatcttgttcctcattttttcatagacaaactgtatgcctgacttgcataaaattctatgaacatttacctgcctatataaatactcacaaaagtgagaaaattcttaatatgtcttagatacttagagaccatatttccaacctcttttcatcagcagcatcaagaaaatccctttttctatctctataaaggcatatagaccccccagagtctaaaagaaaacttaaaaacttaaggaagaatagattttgacaacagtagggaaattcacttacaaccactatgcttttcatgattgttaattaattgggacaaatgaaactagaaacatgagggtatctaatatatactttattagattaatccctcttacactttgatgaccattttcaaatgtatactatctttcatttttatttaaatgtttcgtatgcttgtatcatgtcttatctactagatggggaagataaaacgaatgggctgggtgtggtgtctcacacttgtaatcccagcactttgggaggctgaagtgggaggattgttgagctcaggagtttgagaccagtctgggcaacatagtgagaccccatctctatttaaattttaaaaagaagaagtaaaatgaaaaaaaaaatgagtgggtgaatggaggtagacagaggagtcacagctggtctccctttttctttctctatccctctcaccatttaccttggctcaggcatataataggatattagtaatgattactatcatgctcttgtgcagtcctagtggcctggggctatttttgcacccagcataccttcaccctttcttttgatgacagggctccaatttccctctcagcaccctgggctctttcaagatcagaacatgcacatgcgctgtgtgtgaagttgactgcatcaccaggtctgaccaatgaggacactgtattctcctaaccacagtgattttttttcaggaatgacaggcattccaatcaaagccactgaattgcagtaaaccagtacagtaaacagaggcatgtctcttgccctgtatttgaatatgggattcggctcaatttgctgccagccatgttgcccctcaaagagtctgagaaatttagtcagcaaggaagaaagcagagtgggtatgagagaaggaggtagactagattctggtgacgtcatttgatcctttgaatccagcattgccaaaacccagctctttcccttgagtgtttttttgtttgtttgtttgtttgttgattacaggaacccactacccatctcattgcttaagcctctatgtgttgtgttttctgccacttgaaaacaaaagcatttgccacaatgcttgagagaaaggaaaacaagtagagagcatttagagaagtctcatcacttcctgaaaatcatgccaaatgctaaacttaacatatgtgtttggcttttgcttgggctctcaaattaggaaacctcaagaagtaagctggatgtcacatgagataatattttctaaaactgtgaaatggctcatcccattctgaagggtctcctcagagccacttcatttgacaatcttctgagctgtttctccactattttcaggtctcagagccctgagttctagtaataactcttgtgctaattagctgtttggtctgacttaagtaactttacctgactatgatgttggtctcttatctctaaaatggcagatgtgaattagatcagcagtatctatagtgtgatcccagaccaggaacttcaacattccttgaaatttgcttgaaatgcaacttctcaaaccctactctcaacctacttaaccagaaattctgagggtggggccaagcaatctgtgttttaatgagattccattaccaactcccaggtcactgggtgccttcacaagtttgaagaccactgagctagaccatctttaaaatactttcaaagaaaaaatatatgatcttgtctatgactttattccatattcatatttgagacaaatactcagggaaaaataggtataataggcctccatgctcaactggtctttgaatatataagtcacattcgtagggccagaggtctttccaatgtaagaaagccatcgtgttgctcacagtcttcctgaatgggccaggaacagataccaaagataaccaattccagatgttgagttctacctgtggcaccagaaagcaacaggcatgatgttttatgcactggggaacactaatcagccctactgtgaagacactgtcagctaaatttcctttgctcttcaacttcttcacagaacatctgctataagaaactccttgtaactaaaacctgagtctttcccctctggggaattttctttaatgagcctcttgtggctacatctgtacagttttgaaatatgtttcctcaagtcagttacatcttcatcctggattctagggtttgctgtctattggacctcatagctaagatttttccttctaggagttcacaaacacaactccagagtaggttgacatagtgcccagtatctagagaaaaattaagatcatgtaaccttttatttgctaaaaagagatttttgatgttgtgatcactcataccaagatagcatttattaatactaggtgcaggtgtggttttgcatatattaactcattttattctcctcacaaaccctgtaaggcaagtgctattattatccctatttacacataaggaagttgaagaaacaatattggcttgcaactagtaaaggtcatcttactagtaaaaggcagacactgtatttaaacctagagactgactatagaagcctagttctgagccactatactctattgttctactgactgtagaactatactctatttcttctactgactgttcatatgctctcttggcagcagcaacacagattttgatgccccactaatcaatgcagatctgaagaggtgacttgactctatagtagggtcaaatataattttaagggtattgttggttgaactagtaggtttttaaatcctgttgcagatggcctagagaactgtcctcagtgactgtataacccatgctctaaagtttataatgtcataagagaaaaaaaatgtaggtaaaacatgtttacagccttacaaaaaagcattaagcagaagcaatattatgtggtacgtaccctgtgtggagaaggcaaagaaaccaaccagttggactcatcctttgccagtgtggatataagtacttaacttgcccaccaagtattttgcccaacttctgtcatatttacctatgaacttctattataaattattataaattgtgatcttctgattgtacatagtttgcattcttgtgaagagacttaatttatctaatagtgttaattttgaaaaattaacaaactttcttaaaagagagcaagaaaacttatatttgtaaaaactaatgaaagaaagaatctttttcttcctgtactaaaacaattttctgtgaacagttgaaaaaacactctagtcaggtgaagacacttattcatatgtggaatattctagaaataagccatgtgaacagtatgagtatgtgggaaaattgttcactggaatggccacaaaatgaccatgcgtgacctctgggccataagaaagcaggaatactttcctcatcaaaatctgaagttgagggcatgatcacaggaaaaagcttaaatcttattcccatggttgatgctataaatcaagtaagcgtgtatcttagactgtgcatttgtaaagcacagtgtctatcaaaatatcacaattcaacttatccaccacttgctatccccagcattttcatttcctgattgtgtgaccttgagaaacttttctcctctctaagcctcattttgctcatctgggaaggggtttcataattacagaactttcctcaatgggtttagacaaggaataaagaatgtgtgtgcactgagattagctggcacattaggtagctgctcaattctttgtttaaaggacataaagcatgatatataaatacaaaatatatgtaagcttatcactattcagttgaaaattaacctgtaaacatctacatttttatcttctttgatgattccaacagctgtctctaaaactaagtgtaaggaaacagcagactggttgtggcatattaaattataagtgaggactaatttgaggatcaaagatgctctttgggagatatcgcctgactagtaggaaaagcattagctgtctccctctgtctcatgtatttgttctctctgtcttggaaatatccttccccacagtttctgaatcttgatgtttaattgaacacaaaggtctttgagaaacacaacagggggttgttcctggtagttctagcattgaggaaattgaaatgtacattttttttctcatttatcaaagaagggcaagaatctaaactgacattttatatcaaatgaattatgaactgtgtactttgtacctaagggaacaacaactaaattagagttttagttaagagagagagagagacaaaaataggctttgaataaaacatacagtaatttctgctactgtgcctgacagtgacatggccagatacagttctattgtagaactagtgactggatgcaggctactctgaaatctttaaatgtatttgagagaccgtctcagaaaaaattaaacctaaatttcttatgttgttagactttatggtcagtgaaatagtcttgataatctaaagttaactttcagctttttatcaatgcttactttcttaaaaaaaataatagttgcaaagttttacttcttgagaaagtatgaaattataggttgcttgagagggaaaatacaatgcagaataaaaataatatatatgaaaatgccacattccatctctcctctgattatctgtaacacctacacaaatactacacactacactcatatgttattgtgctcataaagagtgtgaatcctaagatcagtgggacttggttcaaatcttaatttcccccctcctactagctgtaagagcttcggcaagttatacaatcagagtctgctttactttgttcttctgtaaatggtagtaaataataagcactatctcacaggattgacactgagaacttaattatgatgatgcctgcaatagatacaacgtgatgcagtacacatagtagttgttacgttgcacagttgtttccttccctatgtgagaagattaggcagcagcaaattagaactccattatttaatggctgctgattcctgaagtataggaagtattagaattaaaattttaaggagaaggaccctataatgtctgtgcaatatatctaataatcattttttaaataaccaattgaaaattcttgggaattgggggtgattcatgctttcttcttctggacaaagctatgtattgattaccatatttttcttcacaaataagtattccaatttatgcaatataaaaataaaagaagcgttattaatatgaatacatttgttttagacttctaaatccccctaggttcataaacctaaaagtgacaaaattccttgatattaatcccatatgctttctgatgccaatgctatactggataataattttgtgactaaattactagaaacaaataactatcactgatagcctgattacaaattttcttcatataattattgatcattgctgtggtaaaatgaatatcataatttttattctcaaatgttgattctaactctactacttataaggtgaaatcagttcttagaagtctttcagcagtttaaattctgccaatgactattgttttattcttactaatagataatgtgaaattaatggcatgttgaggtaagggatgctgtcttgtccgtttaggcggctacaacaaaatactatagactaggtgccttacaagcaacagaaaagtatttcacacagttctggaggctgggaagtccaggatcaaggtgctgacagattcagtgtctagtgaaggctcttcttcatagacagtcattttctttactctaacttcacatggcagaaggggtgagaagtctcccttgggtctctattacaagggcactaaccgcattcatgagggctacaatatcataacctgatcacctcccaaggctccatctcctaatattatctccttggcggtgagaatttcaacgtaagaattataggagggacatagaccatagcagacaccccacatttaagtattttaatgctagatctagttagtatttgagtaatttaattaataaacttgaatattatatccaatcccgttgttacaatgacttttataaccaatctgctctgattcttcaatcattaaatgactaaatttttctccactattcaaagatcacttaatttcttggtatttgattgtatcttagaatagtggattcaatggcaccatagaggaagagtccaactctaaaatataatggtttattttctacacgacctcagtcattttttgttttgtttttgagaaaggctctcactttgacaccctggctagagtgtagtggcacagtcacagctcactgcagcctcaatctcctgggctcaagcaattgtcccacctcagcatcctgagtagctggcaatacaggcatgcaccaccacatccagctaattttgtattttttttttttttttttttttttttgtagtgatagggtttcactatgttactcagactcgtctcaaactcccgggctcaagcaatctgcccatctcagcctcccaaaatactgggattataggtgtgagccactgtacccagcccctcagtaatttattttgctatttttcttgttggatacattcaacaagggataatttaatgcagtcttcctgaaaagagtggctttgacttgagcttgaatttatttattgttaaccttgctaagcatatcaatttttaatttcacaaagactaaattcttcagtgaattattttaaatgaagtcaatgagcaatattagaatcaaaaataaaatagaattaattgaacagtattgttgtatatattttaaattatttttccaattgaagatatgctttaaacaaagggctcaagcaatcaggtactcaaggaaaaagaatttaatctatgctgcctagaaactaattggatgaatatgatcgtattcaaaataataggaatgctaagaaatgctcttaggaatactaagacgaattcaaatgtcgaaagcaaaggcttaactagagtgtctaaatgtaggaagtctctgtaaggaaaaggaaaaaaatttggttggtggtttgagacataacaaaaaaaaattcttctgggcattatgaccaccaacttcagggcctctaattagtctgacaaagtgacagttctacattctagttgaacaaataatgtatctaatgaaattcaaaatcgctatttttctctgagcacagtgagctgcatcattcacagctttggggtatttcaaaattaacagaggatgacttcagtctgtctgatgtttcttggttaacaaattcactgaaattgtcttgcagagcaattttaagcaattctttaatcttaaaccacaaagagaggtggaggtggaggtgtattaccttggtcctatggatgctaatgtgaagtggaatcttttatttctcaaaatggtcaacagcaattagtattcagtggtgtctttttattctggtgcccttgacccacctctgcccccctttctatattactcctattatatactgtaactggggatattcttgcttcttttccattctaattaaagcattcttagtgaacatgggaaccatttttcatttcatgaagaataattactggacctaggtgaaatctgcccattgggttttatataatttttgacaaatatttgcacgaattttgactgatctattcttaccatttctccgtgaaatgttggagaagttttcagttccctcagaacaataaacctaaatatgtacgtgaaagaccaagataaatgttgtaccaccttcaggttgtatttgctaatgtactttaaaatattttattttgtcactaatataagaaataatgatgactttttaacaatttttttttttatttttgcacatgtttctttcctagtcagagtttgacctaaatactcttctactacactagtgacaaccttgagaaatatcatttatttaggttggatctgtaaaacctatagctcttgttatacatcttgtttcttttttttattttattattattatactttaagtttcagggtacatgtgcacaatgtgcaggtttgttacacatgtatacatgtgccatgctggtgtgctatacccattaactcgtcatttagcattaggtagatctcctaaagctatccctcccccctccccccaccccacaacagtccccagagtgtgatgttccccttcatgtgtccatgtgttctcattgttcagttcccacctatgagtgagaatatgcggtgtttggttttttgttgttgtgatagtttattgagaatgatgatttccaatttcatccatgtccctacaaaggacatgaactcatccttttttatggctgcatagtattccatggtgtatatgtgccacattttcttaatccagtctatcattgttggacatttgggttggttccaagtctttgctattgtgaatagtgccgcaataaacatatgtgtgcatgtgtctttatagcagcatgatttatagtcctttgggtatatacccagtaatgggatggctgggtcaaatagtatttctagttctagatccctgaggaatcaccacactgacttccacaatgtttgaactcttgtttctttatttttctctagagtcctttctcagagccaagggtgtcttgacaagtaaaagagaaaaaagttactaaacagagagaaagagagagtaacagactaagaaagacagagacaatttcttcaaacctctactccaaaaaatcctcctcaaaatttaaacgacacatttgtttaaaacctcaaaattcttgcattctttcaaaacactgagctgttagattctaccaacagtatccgctctccaagttagttctttaggttcctgtgtgttggatggggaagaggtagggaaaggaggctagctaccttttatgtctgtgaggaagggcaaaggtctggtttggctaattttaaacaacattgtttaaaataacaggaacttgaactttggagacagttgctagattcaaacagcagcacaaacccctcattacttgtgtggtcttgtgcaagtcatttatgttatgaagcttcagattccttgacccacctacttcacacctaggactattaggaggattcagtgtgatgatacatacaaagcatttagtccattgcctggtgtacaataactgcccagcattaactctgacattgtagtgtgcttatgtttacaaatgaatatcaagatgttagcattgttcaaggggcaattaaccaaagtcattcattaaagttgttgagttgtttaataaacaactcaattaacataaagactctttaccaaaactttgaactttgttcaaatttcattcatccaaaagcagttgctgagctctttctagccaccaggcataactctaggtcctgtgcaaaacaggcttttggagcagatggcgtgcattccctgatggaactgaaggccctggccaccattgtggtgaagttcataactgcacttactgcatgttctggctggctacttaagaattccctaaggagatattggatagatcaaggtacttagagcttggtttcaccttctagggggagaaagggttgctcttaacaaaaactaggacaataaatttaaatgtgtttataaataatgatgtaagacaactatgtcaatgttgttaaagttggctgttacttttaagtacaaaattgcatattccttatttggtgggattactgtacatagttatttttagaaatcagaaaagttaattgatttactgtgattctctcgttttacaaaaatgcaaattgttttattatataagaagagtccattttagaccaaattcattcccataaaatgaaaacttcttggaaaaacaacaaaaaagaactttttaagaaaatgtattgattggtaactcatgacatttcttttctgttttgctttttggctcctgtgaatctcagaaaaaaaaagtctgttgctactcaggaggctgaggcagaagaatcgctcgaacctaggaggcggaggttgcagtgagcagaaattgcaccactgcactccagcctgggtgacagagcgagactctgtctcaaaaaaaaaaaaaaaaaaaaaaagtctgttgcttgacaatggctaaccttagtagaggttttgtggtacagttcactgatctttttccttcattattcagctttgttttcttgagttttatattaaatgtttttaaaaatattttggtaattatgcaggttaataaattataaaggatatctatagttttccccatctctttctggcattctaatgacatgaatgcagattccttattgatccatataagaatgagctcccagaagtgagtgtaatggaatcaagtagccagaaatacttagtaattggattgtttttcacattctgcactcaacttttatggaaaaaaaaaactcgaatcaaagtatatcaataagatgataaatccattcattccttttcagtatccagtccagtccatttaccagggagtagccaccaccatctgtgcctcaatattttcaaactaaacaacaattgtagtttctgtgcttaaaatattgatggaattagtgattccccatctccttcgtatacatttcagactctttatctgtcctacaagaccagtgtctcccacccttgctgccttgcttttaattcctcaaacagtgagatcaccatagagcttccggcccataacaggtcagcaaagtcttagtcatttaacaggtccaaacttaaataccacttccttagaaagcctttcttctttcaaccaaaattaagtcggccccctttaatgatacctcttagcacctctgttctccctcctagcactttgtgtacattttaactacatattgctttctatttgtttgatgccagtcttgctccacttgacaatattctcatgcccataatggtgtgactctggctagtttgttcttcattatgcacccatcacctggcacgatgcctggcaagggagtaaaggaggatgggtagatcagtttttcagggaatataaaaatgacagcacagttttatcacaaatgtttaatctttctgtatttccatatttatagcttggagattgcatagtaaacaggaaagaggatgaggttttgaatcaaaattctcatgtttgaatcccagcctggcacttagcacaatcacaaagaactgtaggaggaatgcaatactcacatcatctaattcatggtatggctgcaaggccaaatgagaaaaatggagatgcattcaaaaggtgagagctacatgagaattcatgaacacaaagaagggaaaaacagacacagggcctactcgagggtgaagggtgggaagatggagaggaacagaaaaaataacctttgggtactaagcttattacctgggtgatgaaataatctgtacactaaacccccatgacttcagtttacctacataacaaacctgcacatgtacccctgaacctaaaataaaagttttttaaaaagtaattgaaatgttcgtaactcaaaggataaatgcttgcggggatggataccccattctccattgtgtgactagttcactttgcatatctgtatgaaaacatctaatgtacttcatatatatatatatatatatacacgtatatatatatatatatacacatatatatatatacgtatatatatatatatatatatacacatacctactacctaccctcaaaaattcttagaaatttttttaaagaataaaattagacccctatctctcaccatgtacaaaaataaaatcaaaattggttgaaaacttaagtcgaagacttcaaactatcaagttactacaagaaaacattggggaaaatctataggacataggtctgggcaaagatttcttgagcaatatcccacaagcacaggcaaccaaggcaaacataggcaaatgggatcacataggttaaaaatcttctgtacagcaaaggatgcaatcaacgaagtgaaggaacaccccacagaatggaagaaagtatttgccaactatccctctgacaagggattaatcaccagaatatataacaactctataggaaaaaaactaataatccaatcaaaaaatcagcaaaatatttgaatagacatttctcaaaagaagacatacaaatggcagtcatatgaaaaggtgctcagcatcatcaattatcagagaaatgcaaatcaaaactataatgagatttcatctcaccccagttaaaatggcttatgtccaaaaaacaggcaataaataacaaaagctgtcaaggatgtggagaaagggaacccttgtaccctgctggtaggaatgtaaattagtacaaccactatggagaaccatttggaggtttctcaaaaaactaaaaattgagctaccatatgactcagcaatcccattgctgggcatacacccaaaagaaaggaaatcagtatgttgaagaaatatcttcattcctatgtttgtttcagcactgtttacaatagccaagatttggaagcaacctaagttgcatccatcagcagatggatggataaacaaaatgtggtacatatatacaatggagtactattcagccgtagaaaagaatgagatccagtcatttgcaagaatttggatggaactggagattattacattagatgaaataagcctggcacagaaagacaaatgtggcatgttctcatttatctgtgggatctaaaaatcaaagcaattgaactcatgggtttagagagtagaaggatggttaccagaggctgggaagagtagtggagggttggggagaggaggggatgcttaatgggttaaaaaaatagaatgaatgcataagacctactatttgatagcacaataaggtgattatagtcaataataacttaagcgtatatttttaaataacttaaaaaatgtaattagattgtttgtaactcaaaggataaattcttgaggggatggataccccattctccatgatgtgcttgtttcacattgcatgcctgtatcaaaacatctcatgtgccccaataaatatacctcctatatgccacaaattaaaaaaaaattaaaaaattaagaaaaaaattgttctcaagtgattaaaactaagatggctgggtaatttaagctctgtattgggtataagcagaacatactttttctaaaccttgtgaattttttaagtggttacaaaatattataggatcagactttgtaatttcataaatattattattacaaataatgtatccagagcgatctcaattatgaagtcatcaaggatgggtaagaaaattacagagagaagcaataaatctgaatgtacagtgcttatcttcaagtaacttaaaaggaactatgaacaaatgttcatagttttttgggatacattaaatgacttagtgatacttaagaagatactttgattgatgttactaagaaataataaatgagtaaagcatgattgtagttatggtgtgagtaatgatatgacaggatcatgtgatagacattgggggtaagataaagatcataacaatagcaaacacttatatagtacttatgatgtgtactttattatattatgtatatattatattgtgtaaccacttgatacattaacttatttaatcctcccaaccacactctatgaaatatataccatcttaatctttctttcgttgatgaagaaactggggcacatagagattttggtacttgctcagtaagtagcacaatcaggatttgaacccagataagttggctcttaaccaatacacagatctgcctcttttgtgatttaatcaaaataaactctaaataaagacattacaataaagacattaattagctgctaatcagctaattaagttaaaaatgtaaaaagtgctaattgaacataaaggagagtgacaaaagtgtgaaatgttcaggattatctaatataataaaaagcttatcaaaggtaaaaaagttttcattggaaaagattcatgaacaagcattctagaaattaagaaatggtaaatggccaataagcatgttgtaaatatttcaatcatagtcttttggttttcagtgctatctatagactgacaccttccttatgtatatgctcaggcctaaacacatgaactccagtcccccgtagtcaatggccttctaaaaatatcttaggcaatccagaaccaacaaattttttttcttcctacaccaagtgtccctcccttagaccagaagcttaggagtcaagcatccttctttcattctctacatccctacatctgttccatcaccaaatcctctatgaacaatactttccagactcacgtcaatgaggcttctgccttgggtctgcttcatttgtgcttctcccagtgatctgcaaatctcaactcagataaaacctcatcagagatgccttccctgcctatcgcatctaacatgctaactttgctccactccctccctcatcactctcaatgcccttatattagaaatgcttctttttttctcattaaatgttagtagactttatttttaagagcagctttaggttcacagcaacatcgggcagaaggtgcagagttcccatttatccttgcctccacacgtgtatacccttacccattatcatcctcttccacagagtggacctccactgacatgtttttattacccaaagtccatagtatacactaagattcgctcttggtgttgtacatcctatggctttaggctaatatataatgacatgtacttaccattatagtgtcatatgaagtagcttcactgctctgaaaagcctccgtgttccatctattcattcatacagccctcccccaacccctggcaaactctgatcactttttatcgtctctatagttttgcctttatctttttttgtctttcatctcacccctcttaataaaaaccattttaatttgttcattactatattcccaggttatggaatagtgctaggcatataatagatgacttttaaatagctgctgagttaatgaattattatatatatacacacacatacattatatcagtcatatgtaattatatacaaattatatgacatgtagatatataatatatttaatgatatacttgtattattattatatatgtatatatagatatatataggcattatataaaatactcattttgatggggatactgggaagtggaccactcatatcttagtgatggtagtataaattcaatgttctggaaaacaattagtcaactaatatctgaaatagtagagcattcatcaacgtttacccgataactctaaaaagtgtccctaaagatgcatcattctgtatccatcaatgtcagctttgttaagtgaatgttccacatctataaaaatagtacatgcaattatttgaaaagttatgctaccaaaaatactgactggcatatatagtaaagcaaataaagtttactaaataatatgtaagtattcatcttaatgtttttcttaattatgtgcacatatatttgtatagaaaaaagacaggaaagattatctataataattttaccatggctatctctgggtagtgtaattatggatcattgttttcttcatttgttttataatctttaaagtttatatcataaacatatttgtacttaggaaaatacagatagtacttttaaaagagttctgtttagttctccaagaactaaattttatcatttgtttaataagtatttcatgagcaatactaaactctcaaaatttgttaagtgctctgaagtttacaaagataaataaaaagcatatctgctctcaaatggtttatgttatcattaccttggtttatcatgggacaaagcaataattagacttaaatttaaaatttaatggggttttgggagatgaactatggtcttgaaaacaaaagggacatgtatgaaaccacaggtttctatctactattcattgagacgttgcttagccttttctaaactcagtttttatatctgtgaaataagaacattgagagaaacgaatgataaaatgaatgtactctaaagtagtatttcagatttcatttgataatacctccaagcaattaatctcacttatgttaaaaatatttttcacatttttttgtaatttatttgtaaatagaaaatatgttcgggattctaacaattgttgggataatgacagaaataattttctctgcagatctttcccccatcaactcatccatctttcccccatcaactcatccatctttccaaccattgattcatccatccattcatccagtttttataggatctttcctagacaaagcactgtgttgggcaccatggtatctctttaattacttttctcctttaacagtcctttaagactatgtatacattagaaaataattaatctggtatggtcagctatctatatgaccattttgagtcagctacatagctgatatgaatgaacttgatgaactccaatattaagcaggccaaaattaagatgctcagtgaagtttcagcagcatcacttgaagaaaggaaagtcagtgccttcctgtgttgggctgtggcccaaacacacaaggagtgtaagtttaaaaggcattctcaaactggaacacatccaaatcagttaacaaggctagaagatggttgagaaaacatactatatggaaactagttggagagaacagagatgtttaacctgaaatggggaaatttagtggaaaggaaggcaaatgcttaaaaatacctgaggttctagcccacgaatggtaccagaggcttgctctcagggattagaggtaaggttctaaggagttcagtgttgttagcatgaccaaccatatgcactttttgcccaagatagtcccagtttatgcctgctgcatgcagctcagttcactcctattaattacttagagtgccccatttcactcagaatgtctcaatgtgaacaaaaggttatatttgccctaagttttgtagaacccatacaattctttgttctacatcagaaagagctttccaatgataaagactattcaataatgtgatgggacaacttgccaagtgactattttcctgtcactggtaaggcacaagcagagacctggggtcacctgtctgggatgttctaggtaaggattccttatttggtgagaggataaagttggtgacttttaagttttctgccttctgattttaagattctgttgttttgtttttgaatattctatggtcaaatatcagttccatgacatacctacgaaaacacaatttttaaaatatactctttctctcgctaacatgaagacttctccattttacatttcattgaatttctgtggatgttgactaattctggagatgtggcaaattcatactagtagttctgtgtgtgataccttgtggaatgatgggaatccctgctatgataaagaaataagaccgggaggtactgtttaagaatatgacctggacagaaaataaatccaacatttattgaaatttgtttatttaatattgtaaatggtttgcttttatatagatttaatatatttaatagttattctatattataaatcattcactatagcaggctgtttcagggtgtaaaattaagagcgcactgcctttgaacttaaacggcccatgttagaatcctcagtgtgccagttacatcagttctgcgatttgaaatgaaatatttaacttctctctgagcctcaccttattccgtatatcctacaaagagaaaacactacaattttggagtgtaattctgaggattagaaataattatgttaaataaccttgtacacagtatgctttcaaaaagttcgctctggtgaaagactgttttgtgaacatgaaatctattttaacctacttgtcactatttaatgctgctctgtttgtgcatccttgtgttcaaggttgactgtccatttgttagcacatctgcatattcctcataattaatatctttttaaatgacatatggtttagtgactggaaatcgagtcttgccttctgttttcaatttgttcatgactcaatgactcaatatatgtgtctgaactttaattttccattctggaaagtagaatttaaaacccttgctcatatgtagctatttcggaaaatgatgaagaaatgtgtaatccaaggattttgaatatgtgccaggctattcagcgatgcagcatataggtaaaaggccgcagtttctctaatgttaacagagaagcctaaatgagaatgccaaaaatgtaatccctgaagtgaggggataatttggggtaggctagagtcagattcctagtgaattagcaagaagcaccacatctaaatggaatgagcacaggaagagttggtgggagccctagggaatgaggctgagaacatcattaacctggatgaacaactgatagtacccccagggcagtgcttctgcaagccagggatctctgaaagacaaggcccagtgcacccctggaagtgagtttctaacttccgagtcccccgtagcatttatacctcttttgtgctgagtactctttttttggtgatacagttatttgagtcaggtctaatctgttaaacataaagtagattatttgattccgccttctacctattctgccctttccctgcctctaacaagaaccttgtgcagagtggtattcagtgtcttgtattatagaattgaatttgatacaaaatattacaggcttatttgatattttaatgcagcattttatttcactattttgaaatgcacacacacaggcaaaaaacaaaacacacctcaaaagtaacatgttggtgggatgtcctgagaaagaattcagtgcatatggaaagcacagtgaattcattttctccctaaaatattcttcttcttgtccccacagacttggtagccaccaactacgtttgtaaagcctctgtttttgcctttgagagctcactcccagagttttataaatctgcagggagcaaaggtttaggacatgtgtaaataaatcattttatattttttcgtttgttttattttgttttgttttcttagagaagtttaggacatgtataagtcattgtctatttggtgttttgttttcttttgtttttcatatagatgagagtccagtggcgtatatcatttttaaagtttaataaaattatacattcaaaagattataccatctcaattattccaatctgtgatttaatttattgcttaatgttttgtatgaatttgattttctgaagcaggttaaatttgaaattttattaaaaacccacttcctttgagtttatagattgggatagctgttttatctagtcgctgtgtagaattagtatttactggacaagatgtgttgattcaggaggttgtcttggagtgtttgccccgtgagggtcatattaaacttgagagaagttctttgagcaacagagcatcttggagacaatatatcaagctgatggatacagggctcttctgttaagaaaccagcagtggaattatggctggctcccagttattgctttggtgctaaggagcctctaaggattaaatctaggataaaaggggttaaacagaggggaaaggaaggtttccagaattcagtgttactggaagcatacagaatgagtagttatatacaaataatttaagatgaccattctgtttggaaatatttcacaatttaatatattcaaagtgtaccaatttagtggagcatattgttttgttattactcagaagagaattcgtgacatcttattattattataaagcctactttggggcacttcttcctactgtcttaatagaaaggtaatgtagtttttaacacataaggggttttgtgtgcatattaaaaactaattttttcagggctaatgacttgaaattcagaatttggattttcaattacattatactccttgatgtagaaaaattagacaaaaataatcaaaagagagacatggttttatatgttatacattgtatgcattttgcactttattttttgcctgtgttttcacagtgctcttttttctatgtatgcacttattataaatcaattaaagtatatatgtcaaataaattatgattgttaaaaaccatttgtgttcatagataaaaatatcaattaaaaagcctttagcaatgaatgtccttcaaaccaaaaatgtgaaggtaagaagtggatagttggccctggacagcaatcttcttgcactttctagtcatgccacacttttactaattgagagaattatttcatatcatttcctctttcttcaagcctccatttcatccacccaatttgtcactgagcctttgcttttattttgctcactaagaaactgcgcatcatcaaaggagatctttgctattattccatcactgaatctactcactgctctacatcttcatctgtgcattcacttttgcacaatgggagaactatccctgctctgtttggcagccagtgtgcactgactctcagttgattcaaatgtgcactggctcacctctctcttcccacactaggactttgctctggcaattctttcttttacggtatcatttcccctaatctgtgttagattcttccaacaaacatgcctatatgctgcaacatcttccagtctttagaaaaccttcctttgatatcatgagcttttctagctgctgccccattttctaatcccttttagaataaattccctctaagtgttgtctaagctcactgtatctgccctttaccccctcgttgtcttcacaaccttagctcagactgctatgcccagcactgcactgcatctgctctttgcaaagttatcaaatatctgcacttggccaaatgcaaagtttcaactcccagtcttcttcctccttaaactctcagccgagttgatacagctgatacgttcttcctttttcatgtgccttctttctttactcggcttccagtctgcaccttctcagtttttctcctacctcactgaccattccttctcagtatcctttcctagagaggcctcctcctgacctcaacattttggtggattccagggcttggttctcagacctcttctatactcattctatcaacactcacttcctagtttatttcaccatctcagcctttaaagatcacatatatgctgacctacaactcctatgaaggctacaactcctatgaagacttttcctctccctctcctccttagtccgtgttagccacactgttccttaaacacaaccagaatgttttcctccttactgcctttgaatgtactgctatctctggctggattactcttcctccagacattcggatggctacctccctcatgccagtgaagtctctgttcaaatatcactgaattgcattttcttcctataatcttcccatcgaattgaagttgttacctagtaactaaaactgcccaattctttttaccttctctttccttacactgctttatttttctacaaagcacttatggccacctggtattattgtatacacagtattcatttgtttaccacctgctccctccacttgaatgtaagctacctaggggcaggagtggtgtctattttattcagtgctgttcttcttccacatgaagagtactgcttagcacagagtggagccttaataaatgtttattgaacaaatgaatgaattattaatgaactcaaacccattacagcagattgatgaaacatgtaatctaattcttctgttctcatcactggtcattcattagcctcattgttcacagacagcttcttctgaattggagagtatgtaaaattgacacactacacaaggttatgtataaaataaagttgaaaatggaccctgatatttcatttgttctcattattttgatcacttctccttcttcaccaatggcctctggtaatttgtggtcattaggaacctatattacaataatcagaatgttcccaacaaagtatattatactagcaattaaattatgctaaagaaagttcaggtcagtccaatgtaataatagtaataatagttagtgactaataattaccagggtctaaaatcaggtgctttatttatatgatctctgaacttcacaacaattctataaaggaaaaatattatacctactttagagatcagaaaatataggctcggagtcattaggtcattttcctaaaggcagagttttgctgaatttgctttcaagtttctgaatagctttggaacaaactgatatgatttggaacaagctgatatgacaggctcatttgagttataccagttggaaaaaattaattaaataaccagagtcatcttatcaactttttttagtagaataggctttagttttacacattcctgttaggccttctagaaccattcaaagagatttccctggtagattgtaccaagcaggtatgttgaagtcagaacagatttgccggagactcaactagactagaaaaagtggtatgcatgttccaacttgcaaaattgagtaagggcaggagaagggataactctgagaagggtaattgtataaaacacatagggaaaaaagtttactttttatattttcatgggtgagcattaaggctggaatacactgtattcagccattcatgtttatttatcattccagaaaaatacaattttagctaacttcccttcctccaaaaaaaaaaagaaaggaaaagaaagccattgtgttcacatgtagtggtgtgattaaggcagcaatggatgatatcggggggaagaatatgagatctggactgcttcagtgttcaattgtttggtctgttgaacaaagagttaaatgaaaaaggtactttaatatttgcttcactaaattccctccatgttttcaattagataaacagaagtacaggtgggaatgtgctgcatattcatttgtcttgctgtttgggggccggcttttaagactgaaatactaatgtaattgtgttgaaatgaacaataaggaagtacaggagttcaggaatgaaaatgttaaattaaatggaccatgtttaacattgttgttgatcctgaggaacagtttttccagtatatggagcatttcgattccatccagcatatgttctccacagttttctctgctctaattcatctgtgtttttcgacagctccagatggcgtgctgcctcccaggctttcatctgccactccaaccagtcttcaggttgtctggtctacaccagctcgtaataacgctcctggctctcccagataccaactccagatgaggtctggcgactccacccatggatttctagagtgagcattctactttgtccattctatcagctgggttatacaatatagacataacatttttgaagagtaggtcagttctcatttgcaaaaaatataggttaccttttaaaagtacaaaaaaaccccaaacaattagaggataatcatttgctttgcaaaaatatctatttttcatttatgtagcatttaaagtaggatttcttcccactgaaacttttcatgagcacatgcattacataaagcaatgaaactaacaaaatgatgtctgaactgtcgctaacaaattataatacctattctacaaatccacatggcagtcagtctcaatactactaggatttacatctcgtataaacacaagattacagactcagccaatggctacttattttaaaagagatctcatttgatggcagaaaattacaatacttaaatgtatgttgacatcctctaaaatttttttgtagtaagaaatttacttgcttttatttctttgaatgtcgaaaacttcctaattgacatttatttcccatacaggttattttccaatccttctgcatcgttaagctatgaagtgagtgatctccaaccgtacacagagtatatgtttcggttggttgcctccaatggatttggcagtgcacatagttcttggattccattcatgaccgcagaggacagtaagtggtctgaacaatacacagccaaatgtcttctacatagggagcttaaaatgtcttcaattttttccaaagcaaagaaatgagcctcccttatttacttgttgtttagtgacaataaccttttctagggcaagagagtgagcaaaggtggtcagtctctccagaaagaagaataatgtggtcttggagggttggagggttaggcctacagacaggacaaagtaattcactataaattatgatatggccccattctatccttcagggtacatcttagcgccctgcaagagaaaggttgtcatcttctgctttatgactgaatgttctctgtttcggagaaattctggcaggcagaagaaaatgaaatatggaccttacttcatgaggctgcttacatatacttgttcctggaaacaggtttcattttcctgcttctactcataccccaaagacagccttcagcatagagaagtataatctgatagcagtatattacaaaaggtggattaagatttctttattcaaccaataaagagaattttctagttgttcactaaaaagttatttttgcatatatttgctagattatatttgggaataaatacatgactataacatttggttttatacaaattacctctataaaagcatatatatgaaagtagaggggtttttaaagaaaagttagaaattaaatcaagctacacagagtgaataaggacattgtatctttgaacagttaggttttttgagttaatcttgtgaagtcttttaatcataggcttcttaggcaatgttctctgctggcccattgccatgctggctctatatccaatgagaacgttaagtgactttcaaaagcctagatattaacacaaaagtatggtatttgcaacaatatcaattgtttattaaatgtattgttttatttctataatacctttaattgcattattttagtgaagataagacatcaaattagacattatcagtacaatctatcttgtttaaagttgactttatttttacaaaaaaaagccacctttatgagcaataatgtatgttacttaattcatttcttccaattcgtaattactccctgggagaaagttagctactttgcaaggggacactcagtgtttttgttctcaagggtatcatttagtaaattatcagcacagtacgataaatggcacccaaagtccagaaagcattaattcaccaccttttaggaggaacattacatacactctggggaatctggacaccatgatcaccagatttatggactgaagacttcacactcaaaatagatttttgaagaaacatttgaaacaactgaagatagatttgtaatctccttcttatatatagcagcatgcttgatggcactaaataaagattagccaaaaataattattcaacccactgcagaggtgatggctcaatagaatgcttggaagaagggagaaagcattttttttttggcacagcattctttattctcctagagaaagggcaacactcaaacttcctcagcggtaatctccccacaattttcactgaatgagggccatgacctgccatctataggcagggaggtagcacataaataagcaaaagtccaaaatattgtaaaataccaattagcatagcatcctttgttgagcaaacttacctttggtctcctttttactataaaacaagccttatagaccacacatacacatcgttagaattttcatacccagagaccctccattgttgtggtatttagggcttgagtttaaagtgagtggtattaacccttcattttccttaagtaagaattagtaacacttgaataaatagcaggtatcaactcataaccattatttgtgtttaaatccgttccccaaaatgaatgaactcttccttcctctgctttgtgtatacactgtgaagtcacatacatagcaaagaactggaaggaggccatgtgtacctgcaggttacgttagcagtgcacctgagacatggtgacagggtactgtatattttagatgtcagtggagatggatgccatctctgaaaggatatgcaattgagttgacaaagactgagtgattggcattgggcacaagcagtttttctgtcaaggctacaaagcattgcttataaaaccacccatgttgacagctccatgccagaatcacacttcttacttgatcctgaccagcacctcctgctcaccaaagtgcaattttctttctctttctttcttctttctttgtttctttctttcccctctctctctttcactttctttctttctcactctctttctctttctctctctttctttctttctctttctttcttttcttcctttccttcattttttgagacagcgtttcactctatcgcccaggctggagtgcagtggcaccatgtcagctcactgcaacctctgtctcctgggttcaagcaattcttctgccttagcctcccaagtagctgggattacagatgcccaccaccacacccagctaatttttttaatatttttattagagatgggtttcaccatgttggccaggctggtctcgaactcctgacctcaggtgatccagccgcctcagcctcccaaagtgctgggattactggtgtgagccacctcacccaacccaaagtgcaattttcaatgtagaaatttcacatatcgtcttacagaacgaaacagagaagtcgcctcgtgcccacatttaaattccataccatcaacaggcacctttctgcatcagccacagcctcacagctttccagtgccaaaatgggtcaccaatggcaatatttttagtgtgacatttcaagacagtgattttcagcaagcctgtgacacaggtgaaaccacaaagagaaatctaggcaggcaatgagctacagccagagaagcaaatgcatgggtgcagagaagttatcatggacagggaaacaggatgtgaagaattttaatagatttttttttcaaataatttgtcatttacaccagtgtgccaccaatatccagttccatgcatttttaaaaatctagtgtgctgatgccaaataatcataatgcacatttcctatgaatattttaaatcctgttaaatgtgtgttaataaaagatgtttgttccagccaatttggtcagtgtagtgtttaactggttgcaaccagataaatacaaacaacacattattttttaaatgtgctgctggcagtccaagcacctggcatgtccacagcttgcaaaaatgtcctaagattatgttaggcttgggagcatgtgattaataaaatgaaggcacttgcctagcagctgaaaatgttgatatcttgaaaacaaagataaccatcactcctgattatatgattgttccttctctctcgtatgtttgcaattgttttctgtatagtacatgcatgtagaaattagagttggcagggagggcaagtttttcaaacctcagcttaaatgtggatgtattcttttgcctaccgaaatcctgccttgtgttaactatgaattaacctactttttcttaaaattgtggattccccagcccaaaaaagttagataatctgtttctcttaagatttcccaggaaataagattgaaatatggaatatctaatttcagtcattttaatgacaaacatatatggcatacacaagcaattagatcaactaatgaaattgaaatcattttctaaaaatcacttccctaccctcaaaaaaaaaaaccccaaacttgaattcactttagattttaacaatttagttgtcatatatttaaaaatgtttgatcgtttcccaaatttgtagtttaaaattccatatttatatttttaaccactagtctaagaggcactactgcataaaacctgtagaattcgaacagtttattctgtaggtttacttagacaacttttcatttgttcattattttgatgacacagtgatattttaagtacagttatatgctgcacaacatttcagttgatgatgaaccacatatatgacggtggacccataagatgatgatatcatatttttactgtaccttttctgtgttgagatacacacttatcattgtgtgacaaatgcctacagtattcagtacagtaacatgctgtacaggtttgtagcctaggagcaacaggctataccacacaaactagctgtgtagtgggctataccatctaggtttgtgtaagaacactctaggatgtttgtacaacaatgaaatcgcctaatggtgcatctgtcagaatgtattcctgtcattaggtgacacaagactgtaccattgccatgctatatttgctcattgcattacatcttgttattttttcacatttataattgcactgtgaacagaggagagggcaatgaaggaaattgtcttactgcctgggtcctgctttacttttcccctcagcaaccttcatccatccttcagatactcacagtaatttacaaaggaacagaggttcttctggagtaagacagaaaggcaatgtgaggtcaattgaaatctagatctaacagaacatgcttcttcctcttttgttgcctgacataattctacacattcatcaagccccagctcaagtgtcacttcctctgtgaagttttccttcttgttgctcccttagaattttggtttgtgtttactagtgaatcatcaatatccccttctgaattgtaacgtctcaagacctagggatctgtctcaactatctttctatcaccagtgtctggcgaagggtctgatatagagtaggtgccccaaaattcttactcaaagtactgattaaaagcagagtttgattgaagtaaatccacaaaaactcaatcaagcaaacatttaccgtgtacctactgtgtaccagggactaaaagagatatgaaagttgcaaggatggatatgatactgtttttcccttgagatttcctctgtctggcaaggagcacacacagtaaaaccatagttagagtgaaagagctgagttgtccatgagagcaagctcagaggaagggcatggcccctcaacatgagggccaggaaagcctacccagagaagaccaggagaggaattggaaatgatttatatttggagtgcactttaatatcaaagttcaaatttacaccatctccacttgttcagggtaaggctggaaagcaattgctgtaagagagcactgacatatgagacctgaagagggactctcaggttgtcctgtcggtcgttccagcctctgagtatgaggcgaggagggtggggacaagaggtgaatgtaagagagggacatcccaaaagtgattctcatttttttaccttggtcagaggcaggcttctggctgtccctctgattcaatattggctgctgtcttggctaggttaacgaatgttctagttagagaggcttctgccagccccaaatcatgtgctattcggaatgaaggggagggatgtgtagaaagaattctaaaacaaaaccatttttcctgtttttattctcacaacctgtaataagagtaaaatactctgagaccgtgtaacagaagaggaaggaaacatgtggtataaaatttgataaattgatcaagataattctagagtaggacttccgaatcatttaagtgcacatatgcccttaagattactgaaattttaaaactaatattgcatgacaaacatcttatgtttagggcattttagaatttaaagtttcacttgcatccttaaaatcattctacgcaacacaaggaaaatcggaatatttttaaatgagagtggaacatatttatatgagtacattttatttaatgaagaaagaggaactacaagtttcagtagtgctacacaactattttgctttctccattccaaatatttttccagttgccttaagtactaacctctgattgctgacatgtttttcctttcaaacagtaattcaggtatctattttgcatagaacagaagacccatgatcaaaaataacatttataatcttctgattttgagagcaaaatggttctgcatgttttcactacatactttgttttctgttgcatagattttctccacaaattcctgaattttcagaattaacaaattcaaatatttacaattatttttatattttatttttataatgtaagatcaaaaggaacttattcaagccaaaaatgaccaatacggaatcctttgaaaggatggattgattaatcaaaaattctatccaccttgcctcaatttcccacttaagctctcgaatctcccctgggcacttaaagcacactcctcttccaaatatagagtgcttgtaatgtctgtgtttcttacagctgaagactgcaggtgaaagtaatgaaaaatcaagttttttatgtttactttaagaaattaatgaaaaataattttatcatagctgccttattatcactacttaaattttattgagggtgtattatatgcaagacactttagcaggaaaagtatatcctctcattatccagaaatgctatctgctggccttccactatttttaaaaactattcttgttctttagctttgaaaaagttaaattgtcaatatttgaaaactctcagtggactatgtgagatcattcaaagataattgccacaggttgatatttaatggcatgagtttagttttaattctcaaatcttaaattcttagagagtcaagtatctaaaaactgctggttattaacaaaaagatggatgtttaccataatcattttctatagcattttctatagcacctgcctataaaagaacattctgcaatgctaaaacaatacatagattcatttaatcttgttgtcttcctcattttgataatgtacctgtaaacagagttgatttgctatatttggaataattcagataagttttgcccaaatataaggagtgaatgtgatgacctttaggttttttaggatgttttcctgacttcatgaattctcacatcaatgcattttattttctgcaccaaattatcgcagatgcatctactacgattcaccccacaatatgccccagctctagaggttgaaacattctttctaaacaatactctcctgatatcaggagaaatagagaaaaatagttcccgaatattggttctcctatttgcaaactatcaaataatgtccttccaattccaacagccttttagccttcagaggtttctttcattaaataatgttacttatgttatacagcccatttccttttttatcagagtcaggctgaaagttcatttttctgcaaaactgcagtgcccattcttaatttttgttttgagaaataactgttgtaccctctttattatcacaagattaataatatttctttattttattgctcctcttacatttggatcttttattatgagctgtcaaaaattcttttgggaagtagttggggtataaataataaatcgataaaagaattcatgattaaagacaagatagaatccattattctgttaacatatcagtagtgaataacaaaaggctacattgacaattagcatgcaatatattgctttatataattatacatccatatatttgccactttgatttttaattcactggtaaatttaggggatactcatttatggagttaatattaccaaaaagagtttttaaactgagcgaggctttaattagaatggtaaaatattgcttcagggcaacaatgagaatgtaacaagaaaactgactgatcagtcatgggtaactcgaatagcaaacaagtagagaagactcacaaaaccactgaaagttatatacacactcaagttgtgagtcattcaaactgggtattcatacacatgtatacaaatacaaacaagtgtgtgcgcacacaccctttccaatatacacacctgaatataaaactaaataagcagattcctctgttaacaattttattactctattttaggctggggctgaacttttgaagctgatgagcaaaatagtttcccataaaagataatttcatttgccaaaatgaaactactttccgttattaatgttgcaatgaaatggtttgaaatatgagtctgtgatctggacagaaaggatgctcctgttcccagctccaagagggagttctctaaacaattacacccacggagagcgctgtaaggttgtattttcatcaccggccagctgagctgtgtgcctgtcatactcccagtctcccctccagtgacagccgcattgacaacatgttatactccacattgattttacagttaaggagctgattgtgatatatagagattttaagaattcagctgagaggctgacttttgccttttatcattccattaaaattttataaccatctttttcatgtcatttcatccatgaattcttactttagaaagtgatagctactgctgtgagcataacttttctcatgttcagagctttttattgtattagcaaactaccccaattatagttattactcatgttttacataattgtggtggccctttcaaccatgcagttgcaggccagttgatttgtatatagaattagatgattcggcttatcattttaaagcactaaattgaaagagtgccaggagtcaggttttaacacttccctagccaaaggagctaattaagctgctttcagcttcctctccagaatcacacaagttaaaggacccttctgcaacaagagcagcgaatctactcagccagagcaggaagctaataaaatgtatgctggcttttaagggggaaacaaatcatgaaattgaaattgaacacctctcctttcccaagataagagatcatctttaagaaaaggctgtgtattgtgggggtttgaagtgcaagttcatctcattatcatggatgtttcacccataatactatcatcatatgcaggagaaataaaagccttatcccccaatcacagagaacaaactgcatcattgttgtttcttttccctgaagatgctcacagtttgatagttcacatatgaggaataattatgcaagacccagatgaaaaccctaataaaaaatattctgatttttaagtgtatattactctctttggggaagagagggtgagataaggttagacattaaagacttgaatctccaccattgattttacgaaacccaatctcaggggatttgggggtttttttagatttcaaaacaacattgatatcttacaagactcgtacttgcttttctctgggaaatagccaaatctagatgacaagcataaataagaaaggagctgtatccccattttgatataataattgctactgctactgtataccagagagcaaaagtaagaaatggcatagtggttttaagaaagctttaaaatgaaagctaacaagagactgaaacggaaagtgtgatttataccatgactgctggttttagggttttttttagggatttctcttcaaataggatacattaccaaattgtcagaaatagcttgatttcagagttagtgcactataacatcttttgcttcgaaaagtgattatgattctaccatcagtccagttggtgacaaatacgtggatcctgttgtgtgaaagtgtactcatataaccaactattattgcagtcactggccctgcaaagcagtggttgcatttaaaatttcaaccttctttgtaacactgaatcgcatacacacactcacaagatcaacgctgttttaaacaattactaaatccaagtatatcttttttaaagattttcaataaaatctaatgttcacagaaaaatctcataaatgtcaaaattgctgtgggcagaaaaggggggatacagtattttcttgatctgttttagcaatttatagatttcaggccgtggtttataagaatgctaaatgttctggaattacagctgttactgatcagtgattgagccagatttgtgttattgcaccatgttcttgcttgtacctagagagcagtaaagcctcaatataataaaaagcacctgcattttaaatgaaatttcaattgaaaaacttaacagcccttcaaattgcagaatttaacgcagcccagtaaagcttaaataacactttgcccccgcaggctgaggggtttgcattcaaggtgacttgattgtgtcgcatggtgaaattatttacaattaaggaatttctctggagggctgcagaatatttgctgttccacaacacctatgcaggcatatggtgggcctttttcagtattcatggagcctcctgaacctttatgataattgaatcagttagagtgctgagtggagcaagcataaaacctgttaacctaaaggtcagatctgtgcattgtttatttatcagtaggtgaaagagctaaatcggcagcttctgtcacagccacagtaaaaaatcgcctataatattaacagggagtagataaattgcaaaacatggattagaatgataaacagaaccaagtataatatagaatatataatgagagatgctgaaggattttactgggctgtaaaatatgcaagtttgttatgatagtgttattgattataattagttactggggctctagaaaaaaatgtaggggaagctagaactttagtaacaactaccctcttgtatgtttattaaatttatttttttaaatcctcattttttaaccaatggcttgaataaaaagacatgattttgataaagctgtcttagagaggaaaatgatcattttagtttcataatattcaacaagtatttcacacgcaaaatttatgagcaaagcaatcacagtccttgtctttatggcacttatttatttacttattggcctttaccaagtgttcattttcatatccttgtagcagagctatcactcattttagctttgaggagaggtgggacatttccaagaggtctgactttctggatttattttactttacagaacctggacctgtagttcctccgattcttctggatgtgaagtcaagaatgatgttggtcacctggcagcatcctagaaaatccaatggggttattacccattataacatttatctacatggccgtctatacttgagaactcctggaaatgtcactaattgcacagtgatgcatttacacccatacactgcctataagtttcaggtagaagcctgcacttcaaaaggatgttccctttcaccagagtcccagactgtatggacactcccaggggcaccggaagggatcccaagtccagagctgttctctgatactccaacatctgtgattatatcttggcaaccccctacccaccccaatggcttggtggagaatttcacaattgagagaagagtcaaaggaaaggaagaagttactaccctggtgactctcccgaggagtcattccatgaggtttattgacaagacttctgctcttagcccatggacaaaatatgaatatcgggtactgatgagcactcttcatggaggcacaaacagcagtgcttgggtagaagttaccacaagaccctcacgacctgctggggtgcagccacctgtggtgacagtgctggaacccgatgcagtccaggtaagatactgactattctctctcctttgcagacttaggaatgtaccctggattgactctgtgttgaacagagccatctactgactaaacaaacgcatttgttgttttaggcattcactggagaaactgggttttggcctttggcccaaactatcttaaattcgatgtcagtttttcatttatccctgtatccccttaattatattgttgagatgcttccatttgcctcgcacacctgaaatattttgaatgccacaatgatgcttagcttaaccaccacgtcagatttaaatagatcagaaaatgagaagagatgggaaaataaggaggaatgaattagcatattaacaaaattttccattaccaatagtctggtattttttaataatcaaagaatcaaagtaatggggaaagaaataaaaatagcatattaacgggctatccagaaagtgttcaattattcacctcattctattgggaatgaactctagtggacaggataactaccattgttttggctggcatacaaacttcattcaagggaaattagtgtaaccaaacaggagggagttttgtagcttagaagcctcttttgtgtaaatacacacaggcttccatggattcagtcttgtactactgccaaaagcattggtacagtagcttgctcaccggagcacaaaacaaaggacatttgcataacagcaaagttcatctgctgaaattattacttggatctatgttgtgtgttctctctcccccaccaaaagcaaacactaggtgatgctaaacagtgtaaattgttggagaaatttaatttaacctacaaattaaaagctatttttaaaagtctttgttagttttaatatgaagctggtcaaagcaacacacatttttgatataaatatgtgtatagaattccattcattaaacactaatgggaaattaattttaagtacacgatatacgatgtttattgtatgaactgagcaatgtaaagaattgctcttgattcaaaataaaaacaaaaccaaaaacaaaacccaagcatagagttaataatcattccagaaatgactttttttttcaatcttgggggagttttgtaaaactttggtagcagtaccaatcactatgatgcaacaaaacaaacacagtctctttacaaaggcaacactacataatggacattgttctggattatttcgaataaaaatcttataactaggcgttactgattgtggccgatctgaaaaagagtaagtattttcaggccgggtgcggtggctcacgcctgtaatcccagtactttgggaggccgaggcaggcagatcatgaggtcaggagatcgagaccatcctggccaacacagtgaaaccccgtctctactaaaaatacaaaaaattagccaggcttggtggcgggcacctatagtcccagctactcgggaggctgaggcaggagaatggcgtgaacctgggaggcggagcttgcagtgagccgagattatgccactgcactccagcctgggcgacagagcgagactccatctcaaaagaaaaaaaaaataagtattttcagaggaggaactcagtgtacaattctgcttgattcagcatatataaacaataattaaaagtatcagcttgcctggctttttcttcacatttttaccctcttttgattttgtaatatcatccatgaattaaacaatatacatggcttgtcagcctgctagagaagtttagattagcgtggctagaaagctgaatctcataggcactcacctgaggccacaaggcattggtaaccccaagtcaggaatctcaatgtctctaagaaggtgtctgaaatatatgaacatggtacactagtaatattctaaaaattcacactttttattctcatcttataactaggaaataaaaagttatcaatagaatcagcaggaatattcaactgagtctagtatttaatgctatatactatttaaagagtattaagataacatatctgtccttcagtattattggctcacatgttcagaacgatcttaagactttaccgaagtggacgttctcgtgatatagcttagctggtaaacagaggtatatgacagctaaacaacgacttctctttgtaaaatatgagatttaaaagtccaaattgcaaatagaaaatattttatatgaaataacagaaggatagtcattaatgcattggttaagaaattaattcaactatttatcatagagggttgttccaggtattaggatggatgaaggaaattgacagtaatattaacagcagtaacaataataatttcagttctattgacatttacggaacatcagtacatgagtgaacatctttgtaagtgcctcttttaggcagtagggacacagaagagatcaagatgaagtccctaggctcatggcgattacattttagacagaatgcaaacaaataactatgtaatatacctggaagtaataaggacttgggggagaagaacaaattgagtgtagagaaatatggaatgccagctgatagggtgggggataatacaaggagcagagttggtatttcaccttagtgttactcattttgtgcaatgtggtttttttctccatacaatgccacctgtaagaattacagtccaatagggaaatcaagagagacaacacatacttaggctaactagaaaataaatgcaatgtaacatattagtaagtactaaaagaggtgatatgacttggtataaatatgagccttgagaaaggcaaattggagagcacagcagcatagatgaaataatatgcttaaaatcttatttgattacaagaaaaataaatatataatgtcaaagagttgtgtcacctgaataagtgaaagccatgcacttttatttaatatttaatcacctaagaaaatgtatttcattttataaggttggtaaaaatgctctaccaagacctaaaacagttcaatgaaactatagactaatttcatttatgagtacagattcaaaatttctaaataaaagattaccaaattgaattaagcagtatattaaaagaatgatatacaaggacaaattgatttcattttaaaaatgtaaggatggttcaacatcaaaaaatctatcaacatatgtcttacatcaaccaattaaagtagaaagcccatatggtttttttttatcaatagatgcagaaaaaaaggcatacaattaagaagttatttctaacaaaaagtcaaagtaaaatcagattaggaagaaggtacttaaatgggataaagtcaatgtataaactgctgtactgaagccttgaattgaggattgataagaaataacatgtataaataactaagttgcatgactatgatgcaccaaaaaaaagaaaaaaaaaacttcttttatgataacatcatgagcctgtaaaccttgatgcccctgtccactttttcacaggtgaagcagaataaaatagagtaatcctgcagctgtcagctcctcttatacagtagggtcctcactcagctcagacaggtgaagccaccagccttggcaggtgcgccacaaggaacagtgtcacccagaccacaaacatgtgtagcttccttccctctgctatgtacacttagggtcactcatttatgggtttgataataaagcaaagtaaaagaagttgagtcttaatcatcatcctcattgacttttaaagatgggccaatgtttgatgtctacttaaaataaaccacagacaaaaagtataaaacagaggaaataaaataataatgaaaatatattcactgagttcatgttatgttctagaaattgctttcatttaattcttactacaactgtgtcagatagatgctattgtcattcccattttacagacaggaaaactgagaatgagggattaagtaatctgcataagattacataaggagtaagagttggaattcacacccaggcaatagggttctggagcctatgttcttctctacttctttacactgcaacaaatggaaaaaaagtgcaatcttcctggatggaaggacttaactccataacaagacaatccttccaaagtcaacatataaactgaacatcattcaaatcagaatgccgatgttttttgtttgttttatttcaaactggataaaataattttttattttttattttactttaagttctgggatacatgtacagaacgtgcaggtttcttacataggtatacatgtgccatggtgatttgttgcacctatcaaaccctcatctaggttttaagccctgcatgcattagttatttgtcctaatgctctccctcccgttaccctccaccccttgacaggccccagtgtgtgatgttcccctccctgtgtccatgtgttctcattgttcaactcccacttacgagtgggaacatgtggtgtttggaacatgaggtgtttggttttctgttcctgtgttagtttactgagaatgatggcttcaaggatgaagctggataaaatgattttgaagtataaatagaagactaaatgattgaaaatattatagaaaattgtggaagaataatgaggtggtactttctgtagtatgtaaacttactttaaagccattgagttataataatatggtattggcatgaaaaagacaaatggtcattggaaccaactagagagtttaggtatagataacgagtatttgttgaaatgacttattgtaggtagaatctgcattttatttcattggtaaagaatggtttgctttaaaaaatgataccagcccgaccaactatcaatgtgtacggaaaaaacagatccctttatcatatcatattataaataaattcccataaattaaaaatgttaatgttaaaaaagtaaaaatcttagaaaaaaaggagaatttcatgtaatctaaatgtaggggagcactttctaaagaaaaaaagaaactcagtagcttaaaaaaaaaagatagctatatgtagctagaaacaatctgattgattttctaaggcataaacttcccccccacccaccaaaaaaagttaacatccaaaagatagatctggaaagtacatctgtaacacatactacagacaaatcaatttcaccttaatatgcataggccttctaataatttataatacaagatactttaatagaaaataatttaggtaagaggatatattaggttggtgcaaaagtaattacggtttttaccattaaaaataatgacaaaaaccacaattaatttttcattcatacctcacataaagtcaagggagtgaaaattaattaaagaaacaagtaatattagcaaaaacgaatatcagtaatttcaagagtttgtggaggcacagatcacggataatttcattgtttatgataaagtgaatttccccaactttttaagaaagtagtatatcaataatgattaaaattaaacatgcattttccttttggcatggcaatacttggtaatctttccaatatgaaataaacacaagagcacatattgcatacattttcaaattttatttttagcataaaataatgtcagtaggattaacaaataatttgttttcaaccatgaaaggaatattatgcaaccataaaaaataatagggtgtgtccataatcaattaagtctgaaaagcaagttccagcataagtggtagagaactttttttctgtgaaaagtttttaaaaaataaaagagaaagagagagagacctaggatatgcaggagtatatttgctttgcttgtacgagcatacaaaaagtatggaagaataaacttcagactattaagttttcacctgagtgaaataaaacagagccacaattaatgtttcttgtatttatatatttgtactctttctctgtctgattgaaaaaatacaaatagaatatttgaaattaaaaattaagattaatatttttaaaggaaaggaagacattgtgaaagacaactttatttcaacaaatatttattgcacatcttgttctgtatgaatttttcaggggagtccatcataagaggaattactacactgtacggagtcaaatattcccacatgatctttctttatggtacatttttatcttctattgacaaaatactcttagaattatgcaatcttatgtctacacacgatggcaaggattgtctcatcacattagacatgagggttccgaggcctggagatgttaaatgttttgcctaaagccacaccgctttgagacatttatcatctcttagtccattcttaacccatatatcaatctttataaatgctcttattcatgaagttcttcaaaatagtttgatggagttaaagaagtgaggaagttgcttactatgcttttgggtgttactcttttcaagcctgaagccaatcaactaacctgcatgtctaagtttctgcttaaaatggggaactttgaaggtgccatgattctttttagagagacttttcagggatgtaaaagagctgctgaaagtcaatcgttccttaaacacttaaccggcaatttagccgtcctattttctgaagacttacaataaacagaaaaaatggaaacctgaatcattaagaaccactcaaataaaagaagtcattgtgataggaaagccatctctgaaataaacattttatttccagtgcaaaactataattctatttaaaagttttaatgtaatattattgttttaaagaacacatttcttgcttattcaggccaataacatgttcttttgtctgaatttttagggatgcaacaatatttcataatctttcttatgtacaatggatatacaaaaggtcataggaaattaaacaaactgaaagttttaatctcatatattttgaccacatatacaataataaatgtggtcttaagcatagaaaagaatagaatacaatatttagttaactggctccttaaaattcttggacatgggcagggcgtggtggctcatgcccgtaatcccagtattttgggaggcaaaggcaggtggatcacctgaggtcaggagttcgagaccagcctggccaacatggcagaacccctctctactaaaactacaaaaattagccgggtgtggtagcacacgcgtatactcctagccactcagggggctgaagcaggagaatcgctcgaacccagaaggcagaggttgcagtgggctgaaatcgcaccgctgcactccaggctgggtgacagagtgagacgctgtcttaaaaaaaaagaaaaaacttgaacacattgattaattgattgattgattgattgagatggagtttcactcttgttgcccaggctggagttcaatggtgcaatctctgctcagtgcagcctccgcctccctggttcaagcaactctcctgcctcagcctcccaggtagctgggattacaggcacctgctaccacacccaggtgatttttggtatttttataccttatacaaacattaattcaagatggattaaagacttaaatgttagacctataaccataaaaaccctagaagaaaacctaggcaataccattcaggacataggcatgggcaaggactaagtattaatggtttaaagtgttgccaagctctgacctgaactctcaaagtattctggtctaagaggcaagaaagccgtattcttcagattagtcaggttgaatttagctgtgatagctcttctttttttcatttctgttacaaataccaggaagctctctgagtttgaccttgactcattttccgggtccacagacagcattgcacctccaaaacaaatagcgtcctatatctgtgctacaacctttgctagttttagggtgtttttaaaaatattccccacatccaggcaaatcctctatgtttataaggaacacatctaaaacttctcttcatcccagcctctcttcttagaactctccaaaaagtttttttaagattcacaatgatttcatcccctgtagtataatttggtagatattggcccattgttaattataaattaccaaagtaatcatcaagcaattgtccaactagcatgtggtgagagcccttttgtcaccaattattagtaagaatactctttaaaaaatctcaggtcatagtcttcctggatgaaaccttctccctttgatttaagatagaaaattatggtcagtccttctccattttaatttctatattgctcctctttggtttgcataggggtacaaatgtacatataaatatgtcaccttgtagaaacctgtctcttaaagtttcaaaataactgtatgctagggaaaaaaatataatctaacaaaacatgactctaattactaactgaactccacctctgtgcacatggtactaagtgaatgtagagtttatccctgctatgaagaagcttacaggctgggacatgagatatatatcctggcatttatataaagagcactagaaggtaccaataaaagagatgaaagaggataacatgtaaataaatgatttttgtcatggcctgtgcacattttttaggatctctttccccataagaacatgagtgtgttaccactatgctcctgtagagtttagccagaaaagaaaataaacttcagacattctagaattctactacaaaatgttgttctttcttctgatgctcaagtccacatgttagctaagcacaaacatctttggcttccctttttcaaagctttctatacattccttatccctgagaagaggatgtgctattaatgctttaattgctaagttatatataaataagattcaggaactcaattttgcatcttcggaaaatatgaataatgatttctctttcccttcctccaagaaaaagtgacttatttggcagtcacactaacagtgcaaagaaatgagttctgatgtttcatttagttgagttataaacatgaaaaccatcaaatcctatgcaaccctattgaagcatgtggatgtgtgaattttctccatgtgtttgctctgtgtccttcagaacacccacagtggcgatgaatcgctaaggtgtgtatcagtctgacagtcgtagaaagtggcaagactgaaagccaaacccaggaaacagcatttcatttagctcctggagtactgctaattgatctcaaacccttcattactgtctagtccaaaggcctcaggagaatgtagccatttagaaaatgacttaactgaaaacaagagcaaaattctaggcctcgtgaacttcaattgctctattcctgtatcgtcacactgattctaagtttatctttcatttcaggtcacttggaaacccccactcatccagaacggagacatacttagctatgagattcacatgcctgaccctcacatcactttaaccaatgtgacttccgcagtgttaagtcaaaaagttactcatctgattcctttcactaattattctgtcaccattgttgcttgctcagggggtaatgggtaccttggagggtgcacagagagtttacctacctatgttaccactcaccccaccgtacctcagaatgttggcccattgtctgtgattccactaagtgaatcatatgttgtgatttcttggcaaccaccatccaagccaaatggacctaatttgaggtaagagaaggtgactatgatttttatgttgctgtagtccttatctctctgagaagtagggaaatgaaggaggcttttattcctatatgaacatagaactaatttggcattgaatatcccctgactcataactttcatacactatcatactgtacacttcaacttattatggaaacatcaaagtttatcaatttgaagaactaaaaacccttgaaaccacaatcactattgtctaaggattcgctacataatccatcacttcattttcaacatatgcttttattatatgttaggcaaacctgatgtaggttctatatgatacatttgcacaaatgtacctcagaattctaaggctaacacagtaattctttggcatgttgttagcttatggaaacttgtgaggagtgtggtcagggagcccgatacgatgaaagaaaagagctgtgattcagaaatggttttgcaaccacccaaacttgatacttggccaagaatacaaagttgataatattatcatcgtttataaagtattgatagtcataggaaaccattaacttgataagctttgtgtatttctactttgtgcgaaactggcagtaaagatttggcacatctaacttagaagaaatctaaaatgctatcattctgggagataatagtaaaatgcgaatgtaactgattcttcaaaatattaaatatatggaatttggtccagaaaaaaaaacgttcatctgaaacaaaaccacgtaactgtaaacttaagatgttattctttatgcttccacgcatatatcacacgcacatgccacagaacagcctgagttttggtaatctcaatatgagttgagataatcctgatgttcctgcttgtcttttgctttagatatgagcttctgagacgtaaaatccagcagccacttgcatcaaatcccccagaagatttaaatcggtggcacaatatttattcaggaactcagtggctttatgaagataagggtcttagcaggtgagattacaaaaactataaaaacaaatgctggcatttagttctgggcatgttgaatagttcaaagtatctcagtgtcttcattgtgtgagcgtgttatcagttatgcaataaaacatgtttggttattatctgtggcattaatcacccagctgtaacagtcagcatgtttaatgttttccatcttaactgcatgcttaaaataagccttttgaagttgaacttgtagatgttcaagccttaacctattgcctttgtcacggctccatctagacataaaacgttatggaagaatttggaaatattgaacacatacaaaatggggaaaattcctgggcacttgtagaatgcttgctatttctagaaatggcttataaatgaattataatgacttataattgattgtaagttattgattcagtccgcaaaagaaaacattagtgaacaggattgggacttgaaagaattcaatctagagttcaaagacattcagtaaaggctaataggtgacagtagaaaagggtgctacatgggagagttaggagatctggttctgctttagcctgtgctggagaactagctttgtgactttaggccacaaagcttcactacttaaaaatcacttaacttctctgggcttcatttttgttgtccataaaatgaggtgattttatagaattaaatgacttctaaatcttcatgagttcaagcaatgtgattaaatttcagaaaacatgaacgttattttatgaaaactcctcgatcatatgtttcagtaacttttctatgtgggtcattatttttctagacccaccactgggtagctgtagtctgaaccctgtttaccattctagccttgtctcccatccctttcttaccaaggcctctgcattccagccacatttgtattgcattcagtacctccaacatacaacacttgctctttcagcttttccccatagttgccttttcctgttgcctgactagatcatctgccacgtcttagcctggaggtttcttcctctaggaggcctttcctgccaacactcttgctggtctgattcagctcctctgtaacatttccataggacatcccctaacatatcactattgtcattgtagtgtactggcctgactgcttgtctaaacaccacgttatattatcagatctaccataaggcaggggtgcggtcttcgtgactctgtcttcagttcctagcatggtgtctggcacataccagcacatagtgccctacacctgaatacttaaaaataggttagctcaatcaagaattaattcactgctctgtaccttaggaatattagctgtagtgttcttctctctggggaatggcaaaactaaggaaaattctcctgtcctcttaaaaagttgtggtgggaaaacatcctagttcttgtaagattctcagagagaggcatctcgtaaatctgatcaagcaacagaatgaactatatgaaactgccacttttataggtgaagattggtcaattactagcagatccatgttgcttatcctaaattataatgctcattatactattctcaactacttttaattcattatttacttaatttggcatccctatatgattatcacttcagtagaataaattcatttatttttgcttatttgtgcttactgtgtgctgaggcactgtgataaggaacaaaagataaatacatcttagcccttgacctcaaagaacttataatctagtggaggaacccttccccccgccccctccatagagagtgtgatataatatgtatttttatatattatatacattattaattatatataataatcaatatatattatatatttatatattgattattatatataattaataatatatataattaatatatatattaattgctgtcctcagagttatctacaaagtcaccaattctgcctaaagaaatcacttcaaatagtagcttcctgtgacctatgaactcttaagtgcttaaatataactatttcaaaaaataaatagaacttgactctttaacattactgaatctgagttttagccatgagctactcagcaaaaacaaagaataagtttccaaaagttaattttgtttctttatacaagaaatgaaaacttattaaataattaggaccaaggccatgaagttagttatgaatttttagtgattcctctaaggattcttaatgagaagttcaaatctaagatttcaggaaaaaataaagtgaatttccacaacttaaattgaaacatgaattgacataaacacacccatgacagctgcttccggaagggaagtgtgcagataacaaaattgtgttaaagggatattttgactagtttcataatgccaaatgtcatttttttccggtagtacttgcacagattttttttatttattaaaataacagctacaacttacattaagcttgtagaaaaaaaaaaagcatttcttcttaacattcagtgtaaatggcgtgagtctttataagaatctctttttctagccctctaccctttataagtccataaaaagctaggagtgcctttagcccaagggggagtgtcttgcaaatatgagagaaaaccaaaacttgatcccctggcgggcaggatatttttctctttaaaggaagtgattttgtttggttagatggtgccactggccaccttggcaacatccggggctccttgttcctgctggtcagctagtggtctgtcaaattgcagagggggatgaagctgagtgttcatcatgtgttggttcacccctgtgttactgttccttcatggcccttcctttgcctatatttgttttgctgatttatttgtttggccaggtatgttttcctgggtttttaattgaattctaatatctttgggaggattatgtaatttcctattctccccagattccaccatcccaatttccttcttaacttaacgtctgcataaataaaaggagcactgaagtgtttcttaccatcttgacttgaatatcaccatagttacatttagaatcagcttttaaatggcacttctcctgatataaaaagtaaaattaagattcactagacatctctttatgaatatatttgtgacagtaaatataagttgaagccaatttcctagttcaagtggtctattttggctaagtatgtgtttataacgcatagaaaagcaccaatttaatttaaaacatcattatatttggaacttcagatcattctagtagttattttttcttttatatctacatgtacaaaacagtctcaagtcaattatccagataatttaattctaacaaaaatactttttgctcttatgattatcttaggtaaggagtaatttttgtctaaattgcacagctagttgcctcattatcgaattttgctctgcctgtgtagacacgaattccgtataactacaggtttatactgcttgtcagtttctaacttttcttccttaataattccttgcaaagtgagcaagttatggttgttgggggaactataactttgggtttcctgacattttcatcacttagaaaatctggcgaacgtgctgttatcatctgaagctgccgaagtgagtcaggcagggtttaacaagagggcggcgacctccttcattttaagcatcaatctaccttcacaattttcagcacctaacaacactgccttggttcctaagtgatcagataaaactgctaagaatacaatgagcatgttctccttttcgttgtggatttaaagaagaacaagttataataaacaatagggttattttactattatagagaaaatattgactgtcagattataatttagatttataaattagctttcattaagtttatgaaggaatgtatgttctaattgctattccttttaattatttatacatttctcagagtatttttttttttttttgcaatgacaatttggatggagacctctatgtgattcctcgagaatccactaattgtattacatttaaattaaaacattcaaaattaacacattttcgtcttatttttcaaagaagggtaagacttaagatgtaaatgcttaagctaaatatatcataaattctaagtttaaatcttattgacatatattttcatatatatttttaaatctactaaaataaagatgtttcaagtcctaaaagaggatgccatttctgtgggggataatattcaaaagaacataacttttgttcctcttctttgtaatgagattaaatatgtatagatgacatctgcatctttgctagtatgaaagactgggtcagttccatgacacgtgtttctataatataaataatgtcagattgtagctattaagtgaagaagttaactttgtacatagaaagggcaagtgaaaggaaagcttctcccgtgactaccaagatgagatagatcctgttaatttattccttaatatgggaatgtgaataaaaattgagtctaagaatgaaagccaacttctgtcaacactagtatgccatctcatagccatgcacttaattcaaaaggagtaaacatgtctttcacattcaaattaaattggtcacagtgttttttcccattggatttttttttcaatgccttacatgccctacacgatgtccttttctgtgtcatcatattatgtgttacctccttgtattagcccattttgcaatgctctaaagaaacacctgagactggataatttataaagaaaagtttacttggctcatggttctgcaggctgtacaagaagcctggtgccagcgtcttcctctggtgaaggcttcagggagcttttacccgtggtggaaggtgaaaagggagcaggtatgtcacatggcaagagagggagcaagagggcgctgggaggaatgccatgctcttaaacaaccagctctcccctgagctaatattgtgagggctcactcactaccacagggatgacagcaagccattcataagggattcacccctatgatccaagcacatcccattagggcctacattcaacattggtgatcacatttcaacataagatttggaggggacaaatatccaaactatatcactcatgaaaaatgaacttctaaatccagaaggatgtgttttgtcacaggaggtttttttcccctagtgttttcttagaataaaaaagcagaaaaactactttcattggctgtatttctttctcatggtgatgacaaagtagaacaaagatggaaattactgcaaaattatcttaggtctgacaattctggtagtgtagatatagatagcaacagaaacataacagcttcaagtttcactcacaatctaaaatgtctcatattaaaaatattcaagtgtgatcaacattactcttcaatttttgaagcaaaaatcttcaatactatttttagaatcaacaaatagattttttaaagtgtctaccatcagctgaaaattttaatagctatagacttaagcaatggaaacaatattgcatttcatttttctttgtttgctattcccacaaaagatttgaagatgtaaggaaaagtatgatttatgagatttctcaaatccacacttgtgtgatggtgtactgaaaaatactttgggttgtggcagagatgaggaagagttagtggaagaagcaactaaataacctgcattttcagaagcgtgatttatattggtgacaatattaacacatgaattctgttaggacatcaataaagttgacacatttttaattctgatgaaaataaccccaggcattctgcagctgccctgaagaattttggtttcccacaatatatcagtcccttccaagatacaagccttcacatattttgccctggacaaatgtcttcactggataaaataccacttcttatcaaaacctgccccaaatgttacctcctccgtgaagacttcccagctggatatggttaaattagatgcttcatctgatgcgtgttcaaagaataaggaataaatgaataaattagatgttctcatttaaaaacatatttctgtaaaattttatatacattatggctccaggtggacagataacaattttattatttttaacacctggcatattggtaatatccaataaatattaaatgaatgaacaaatgaatgagtgaagtgatgtattaaatatgaaaaagcaatataatttgttttcaatatatttttaaaagcactttgctaagtttcagcagagatattctttctattggacaggtagatttttatctcactaacctaaaaaattatataagtgacctgaaatttttgagactgagtgcttaaataactatgaaacatctattcattcatttataaaattatctattcagtaaataaacaaattaaaactgcatcatttaaacataatctagttttctaattcattggagtaataacacctgaaccttgaaatgaatattgttccacaagtaagattttaacacatattattttttatgaggaaaattaccatagtcatgtctataccataataaagtttacaatttgctgtttggggagtggaggagggagagaccggaggatggtctcaagcaaatgggggaaaaactattgtaatagtccaagtattcctaaatggacccaaaaacaattggttttactggctacatcatagactcaatataagtattcacttactttgaatacttatattgcaaaagttttttcctacagagtttaaaatggacatttttcaagacatgcctagagaacacactttgtatttagagaagaaattgattgatacacataagttttgtcataagtatatgatgttaattgatctagcatttttgttttaaaatgtattcttttatcatttattaaatggaatgtcccatttaatatcaacaatcaacacgtaagtccatttgaaaaacagtatacatagagtgaatggaaaaccacttcaagccaactaatacattctttttttgatatgaagtggtgaaatgtgaatcaacatatatatgtagacaagccataggtatatattcttactaaatacagattggaattcagatgaaatgaaaacagtatattttagtatttaagaggattcaggatcttgtttcctcggccaggcgcggtgactcacgcctgtacagaatcccagcagtgggaggccgaggtgggtggatcatgaggtcagaagatcgagaccatcctggctaacacgatgaaaccccgtctctactaaaaaaaaaaaaaaaaaagctaggagtggtggctgacacctgtagtcccagttactctcaaggctgaggcaggagaatggcgtgaacccgggaggcggagtttgcagtgagctgagatcgcgccactgcactccagcctgggcacagagcgagactccgtctcaaaaaaataaataaataaaaaaaaaataaaaaataaaaaaaaaatcttgtttccttaaaaatttaacttaacaatgaaagttaaagtacaaaagacaaatgtacggcctcaaatgaaatatctactgatttctcaattaaatttttaaaaagtggaaatagtgtaatattggaaatgaataaaccctatgtccagctaccccattaactagttgtgcaaacttacacaaatccacttgtttctcagggtctcagggttttttgtttaatctgtatgatgtagcacacactttattatttgtagcagataaactctaaagccatctcttactctaaaattttagaaccaccttgaaaacaggcatgcaattgtgtgtatctatgtggcctgagttttgtagacgtaaattgtgtatttcgccataactaaattattgtgaaatctcttaaagtattataaaaactaaagccctatagaatttatttacaatcaaccattttagcgccacctgatattgttaattccacatgtaggaaagaaccacaaacatggtatcactttaaatccataaagattattaattgtataatagcatagacatgtggaagaaaaatttacatattataggagaggaggctaggtatccagactctagctacatttcttttaagtcattttatgaagtaaaatataattataagtattttacccagggagagagctaatgaagccaaggtcgctggttcaattcccttgtgagccattagcttcatttcattccattgtcataggcttgctaccctcttaaccccgactcatcatccttcatattcatactattggttgcaaaggaaatttggccagactgtttgaatgtgtaagcaaaaatctattccctctgctagaaaaataacgcaaagttcaagccttagtgatatgacatcatccaagtatggacagaacagattatcattatgattgttattattactattattattatcatcactattatgttggcagtatagcatcatggttaaaagagcaggctctgaaatcagactgcctatatttgaatctcagtcctcctacttattatctcaatgacttggacaagttatttatctctctgagccttgtttttcttattttcaaaataggtattataatagcaccttatagagttttgtgaggaatgaatgggttaacatctgtagaaaatgcctgacagctattaagtaactattattattttttagttgtctggattatgtggactattcagcacttgctaaaaagcatatgtattcattttccagggctgcagtaacaaaatatcacatactgggtggcttgaaacaacagaaatttattctctcacaggtctggatataagaagttgcaaaccagtttgtattctggaccagactcccttccaaagctctgtagaagaaccctttcttgcctcttccaacttctggtagccctaggaaatccttggcttgtgacagcataactccaatttctgtttctgtttttacatggccatcacctccctgtgtgtatccatgtgtctataaaatttctctctcttttttcttccaaagacatcagcattgaatttatggtgctgcctaatccagtatgacctcatcttaacttgattacatctgcaaaaaccctatcttccaataaggtcgtgttcacagggaccaggggcttgggcttgaaaatatctttttgaaagatacagttcaacccactacagcagacaaagcagaaataaaagaggcattaaacacctgagaagagatggtaaagcagggaggtgtagaagatctgatgcaagcacatatttaggagaaatagataaatagcctcaaaaagtcactaagttttacctgtaattacaatagagcaacacctttcaatgtgggtcaggcagaaacctgcaaacgtatcttcgggctatgaataagaaacaggatgagtcaagcagatttcttctacctaggtggcagtaaaatgctctgaggatcctgatataattttggtcaaattatttaacacaatcctgcaaatggcacctacccacccatgccacaccacctttgcatcgtcaaatcagagattgtgacatattgagacaaatactgtgggccttacactggagatgaggtatccttgatcatctaataaacccaaattaggtaatgatctgaggccagtgtttgccctgtgtcctggatgcctctgggatggtcgtgtgttgcactacatgtttaagcaagtatctcagtctaagctattgtccactcatagactgactgtgtctgtttatggcatttccttacacaggtagttctgaaccaagcaaaggaagcctgatggtcttctgcccaaaactggttaaaaaaaaatggtggctttactctatagtcaatttaataaatgacttggaaagtcctcctcatatcacatcagcatgtcagtttttgccttctgcaaagtaatattcggtttccactgtattgactcaagtaaatatgttcacactatggcaaaatacagctcactgtagcaaaactctcagcgggagaatgttgtacactttggtcacagttacaatttaatttaggggtttatctgtctgcagtgagattatgggaaagaagcataggtatcggaagaaaatgttgatgagggattctgatatttgaaaatggatgagtttccaaaaagaagagcataaaactctctggatcaaattcagatagaaagctggcaggttgcctgatttgtaattgcatcttgaattgagctgtaatcctcaccacttctgaaaacaataagaataagaaaatgataaaccacatttgttttcaatagcaatatttgttcagcattcctaataaaatatttccctgatgttttggtttatgctggcaagtcacaaaattaatgatatgtgttgtgtaaggagggaaaataaaataatgtattttctagggaggaaaagaaaacagtattttgtagaggggtggaaggaaatcctgtattttgtgaagaaaaaaagaaattatttgttagattttctgtaaagtagaaattcatatactttttttaacaaaacaacattttaggtttacaacctatgaatatatgctcttcgtacacaacagtgtgggttttacaccgagccgagaagtgactgtgacaacgttagctggtcttccagagagaggagccaatctcactgcgagtgtccttaaccacacagccatcgacgtgaggtgggctaaaccaagtaagtaagcttctcatacctgtgttaacactttgtgtatttttaaaagcatattctttctttactatgaacctcccccatgtacacatcattttgatagtgaagtgttactggtaaatttttaccaattgcagattgacagggctgtcattgaaaactttagaagggccatttttattagtacccaaataaattagaaatggacacattaaaactaaaaccctggggcccctgtgccattcttaagatgcaaactctctcctactttgacattgttcttgggcctcctgctctccctctgtcatttcctttgcatgaacaacgtaatttctatcataccaggcaattgtgatagacatgtccatgtattaattggatacaatgtactattgttcaccttccttcagagagctctgccctaatatcttgtaactcgtcgctcattagcaagaaccatttaattggattgcaataatggaacagattcttcccagtggatcatcttcagactggctatgggcagaattccagcttgatccagtaaaaggaagcctagacatcaccactggatccacttaaataatgcagggtcgaccctggacctgctgggaacacttttttaacaggcatttggaagagttcacagagtaatctaatctgttcctgcaacgttagaaaccacagtaactgaaatttcacagttacttggtcagtagggtagtattaacatgttaatttgttgtgatctgttaatttgtgtcaatccctgacgactatcaggaaaaaaaccctgaatctaccatgagaatatgtattaaaatcagtcttataggtataacttgagatctggcaaatagtttcatcaaaacttgtcagaataacaccaaatattgagaaatacctgatcaggaaagacccactcaaaacattttatttatgaaagaacactctgctcactggggtaatcatctattgatgatataaaaagatgaaaagtcactactggttgggcaatgtaaccatgtgattttggttacactggatcagccttgaatttggttacagcttaagaagagagatgctccatttaggacacctgagtgatatcaattgtgaattaaagccagaattgaggatatcaattgtgaattaaagccagaattgaggatatcaattataaattaaatcagtaggttaggtttatctgtgtttccacaaaataatccatctttacaaaagaaaactgtctttctctggtttttataaggctgcaggtttctaatgatctgtgacacttgtattgggatctcttaaaccattttaatggaataatataagttaattgatgcttatggctaccctctgaaacacctctgggaaaaatacaaagtttttatctggggatgtgttttaaggcatatttccattcatctccctcttgctctctactccacctcactaactgattcatcttaaaagcctactcataaaggtaggctctcccccctcatctgacatttgaatacttctgttaagatccggctggtgaatttccaccaatataggtcctttatgttataattgcattcctgaagtaactgtgcttataaaaactgacaaacctaatagatctgaagcagctcactgaagtttcattaccttggtaatctgaacctctgaccttcgggatgtaggtaatgcaatctgctgttatttccattcataccttggaaatttttcagataactatttgtgagcacaaaggttaactctcagaagagggtcagtcttgcgaaagcttgttgcattatcattttcttcttttgggcaacttgctatcttaagtaaattaactagtcgatcctctgtgaaaggtggcctattttttgcaattttaattttaaattgttgtcttgattggataggaaaaacatggcatacagtctaatatgctcaaaggcaacaaactatagattgaaaatactttgcagtggaaaatcatgttttaaatttataaatatttgcttattaaaaatcaccttccaatgtatatatatatattttaaagcatggtctttgtctattatgaccctccccatgtacacatcattttggtagcaaaatgtttctggtaaatttttatcaatcacagattgatatgtataagttattaaaaacttttgaagggccagttttaaacattagtatcacatacatgatatgtgagataaaagcgtccctgtgttacttcagttcatttttggaaggcagatgttgcaaattggcaacacagtggccatatttccttcctcctccagcttccatacactgttttgcccacagtatttgaaaaaataatatttgcaaacatttaagaattatacataaagataatttgaggattcacttgacaagtcaaatgatggggtgaaacaatacccacatttctggaaggaaactatcagctggaactggcttcccctttagacagatcatgccctaaaaatctgacccggtccccattttcctggtcccaatagacaggtgatgtttatccctgctttatatgataatacaaaatattttgccctaaacaaaatacaccaaagataaattatattgtaattttgaaaaatcacagtttttgtatttgaaaaatacctcacttaaattatttatacaatcctcagaaaagcacaatgagatagaaaccagcccatagtaacttaccaaaaattatagaaagtaccagttcccaaactcaaacttaggactcaggcatcaaattttctatttctcatgcgtttagacttaacagtcattaacactttaacaagaaggatttaaaaggatccttctcatcttgactgctcagtctaaaatagaaggcaaaataagaaaatgcctaccaaagggagtacagtggagagatagtgcctcctttgaagctgattcactaaggaagtcagttgtggccagaaaagagcagtaaaacactggagggagtgagagggcaatgctttgtaaaagaggaaatgaaaaatcatcaaaatattgtctactttactgtctgtcaagagctcaccccaaccttcagatgttcatatcttgtatcatataatcctcctggtcttgctctctccttcctctttttttccatcttccttctttctctatttccttttttaaaatgtttttgtagagacaggttctccctatgcttaggttagtctcgaattaatgggctcaagtgatcctctctccttggcctcctaaagtgctggaattacagccataagggaccatgcctggccatttgtctatttctcttcttctaccctctctctctctctctctttcttcctattttccttccttcctcacagatacatttatcactttctctgtcctgagcactcagtgaactctggaaaatgcataaagtatgagggtatcatcattaagagggcaagtttaaaaccacagaaaaagcatttgtctcatcctgatctcttaatcagaaactaccaggtttgatagctagaagtatatctgactttgcctgaatttatctgattaaggtggcaatatctgtaaataattccaaatctcatctcttctaaaaagcacctaccattgttgcctcaccttgttcctctgttctcttttccatcactttagttatcaaatagaagagaccacatctgacttttccattgtcttccttctcagtcacttgtgcacctgttgtaatctgtctctcttcacttgtactctacatggttttcttaaagtcattagttatcacctaatgacccatttcaaaactctcttctcaatgccatcctactgtgttcctcttgtatccagcactgtgaatgatcccttactgactataattcttccccaataatcattactcccctcttctcaccaactacttcttctcatccctaaagatgtttctcaaagttctttcctgagtcttcctatcatactcctgttctcttgttggtgattccatctatactcaaggtttcaaattcttctaattacaaaaatgacaaccgccaacattgtatgcagccatatgaataaatagttttaaaatagactttgggatcagggatacttaaatttgaatcccagttccaatatgttttggcactacgacctagaatttaacctgagttccagttttctaatcagaaatatgaagataataactgccctgaaatctgttaaggactaaatgaaataatatatgtttaacaattagtaatcacctagtatttgtaatacagagtattattctatttctaaaatgtgcatggtcctttcaataccattttatataatatataaaaggggaagccatgtctagtaaaagcttggaagttgattttgcaagactattcagataaaagcattttttttattattattatactttaagttctagggtacatctgcacaacgtgcaggtttgttacatatgtaaacatgtgccatgttggtgtgctgcacccattaactcgtcatttacattaggtatatctcctaatgctatccctccccactccccccaccccacgacaggccccggtgtgtgatgttccccttcctgtgtcctagtgttctcattgttcaattcccaactatgagtgagaacatgcggtgtttggttttttgtccttgctatagtttgctgagaatgatggtttccagcttcatccatgtccctacaaaggagataaaagcatttctacagtgagttgaagatgcataaagaatatatgttattttataattacctgacttggctaaaagatagaaatttaaaaatctagttaaaatgttgaaaacttagtctgggttccatggctcatgcctgtaatcccagcactttgggaggccgaggtgggcggataatgaggtcaggagatcgagaccatcctggccaacatggtgaaactccgtctctactaaaaatacaaaaattggccaggtgtggtggtgcatgcctgtagtcccagctagtcgggagactgaggcaggagactcgcttgtacccgggaggcggaggttgcagtgagccgagatcgtgccactgcactccagcctggtgacagagtgagactctgtctcaaaaaaaaaaaaaaaaaaaagcgaaaactactaactattgcatggcatccattctcctctttttcttttagtgatagccttgccccttatctagaaactgcatttactaacctcccttgcaattagtcatggccaggtgaaataccagtagtatgtgtttgtgtcaatagaaagtgaaagacaatctgcatctttttgggtattaaccagaaaacactgggtgtgtgcctacttgttctcttttagcccttcccctggactggaatgaggacatgatcatgttctcaggttcaactatgcagtcgtgtacaacacccaaagagatccaaaatccccataagagaaagttcctgggttcttaagtgaccacatggagcacagtctgttttgatcactttgaagctattacatgagatacaaattaacatggattttatttaaactattatattttggagattttaggtttcaccagcttcgctaactaactcattccctgtttgcccatatcaatttaccttaaaagtagaaattagctatcctgttttttaactaaatataaaatgatgaataattaatatatctattatactatctcctttaaatacagttttctctggcaggcccctgatagaagctggaacactatgagagactaaagtagctctggagtttccaaagtgcaggtgtttggttttgacagatgggtaaactagagacaagacaggagatatgctgctcggaaaactaaggaggctgacttgaaggattattgcccaagaagttaatctttccacttcatgtcagcagtagtaccctcaggcagagtaaagaattttctcaagagcagttttgacaagctcaaattttccaagagctgcttagttggtgacgcagagccctgcaccatagaacttggaaaattggactctaatttggagattctgcgagcaagatcaagacttccatcataaaatcagcttaataaggtccttccaggtttttacatttgagcaacattacctcccaaaatgagcctgctaatgtgagatgtctgaagaatttagtcctagacaaataaattaagagatctaataaatgaaatgatttactataattgatctgaatcagtacaacaaactttttttgtaaagtgtcaaatatgtataatgttagactttgaagcccatacagtctctgtcttaactcaaatttgccactggagcacataaacagcaataaggtgattctgatttttaaataagcatggccatgttccaataaaactttattttggacattgagatttgattttcatatattaggttggcacaaaagtaattgtggttttcgccattgaagtaatggcaaaaaccacaactactttgcgccaacctaataattctcacatgtcatgaaatactttttttcttttgtttttttcccccaatcaaataaatgtacaaaccattcttagcttgcagggggtgggccacactaggccaacaggccagatttagctcatggaacatagcttgctgacctctaatgtagatgttaaaaatctagaagacataattgacattgataattgtcttggtctgtttgtgttgttataacagaatacctgaggctgggaagtcaataaggaaaagagttttgcttagctcatgattctgcagactgtacaagaagcatggctgtagtatttacttggtttctggtgagggcttttgtgatgcattaaacatgacagagaaggtcaaaaggtgagtggacatgtgcaaagatgcaaaatccaagggatgcccggctttctaaaaacccactcttgagggaactaattcatttcttcaaaaactaacccagccttgccagagcaagacaccaagccattcatgagaatctggccccatgcaacaaacacctccaactaggcctcatcttccaaaactagtacactggaggtcacatgaggtttggtggtgatataaacccttgatccccctttgctgggaaccatggcaataatttaaggccatgtaagaagcacaatctacttgctgttgcaggataacttttaactagcccgtctgttatggactaaagccctaattctcagtgtagctgtatttggagacggggcctctaaagaaatacagtcatcccttggtatatgcaggcgattggttccaggactgccccctaagtacaccaaagctgtgcatactcaagtccagcagtcagccgtgcagaatccatgtatatgaaaagttggccttctacacgagttttgcatgggagaatactactttattttttttggagatggagtctcattctgtcactcaggctggagtgcagtggtgtgatctcggctcactgcaacctccacctcctgtgttcaagcaattctcctgcctcagcctcccaagtagctgggactacaggcacatcccaccacgcctggctgattttttgtatttttagtagagacggggtttcactgtgttagccaggaaggtctcaatctcctgacttcgtgatcctcccgcctcggccttccaaagtgctgggattacaggctagagccaccatgccagctgagaatactatattttcaattcttgtttggttgaaaaaagtccctttataaatggacccaagcagttcacacctgtgttattgtgttgttcaagggtcaaccgtaattaaggttaaatgagattataagagtgggacctcgatttcataagttagcacacaggctcgcttgctctttctctctgtctctcccccaaccccttctctccctttctccgatcacagaggaaaagcatgggaaaactcagcagctagaaagtagctctccaaaagccagggaaagagccctcagcagaaactaaatttgctggcgccttgatcacgaacctctagcctccagattgtgagaaataagtttctgttgttcaagccacccagcctttaatattttgttaaggcagcccgagcaaactaatacatatctaactactgttaaaattatttaggaattcattataaaggagaggagcctgttctatatttgagaatttgctccagctaagataaaatttctgaccaaggattggaggttgcaactaaaaataacatttaatagcaaagctcttatccaaaaaggttacaacctttttcagctcactgagattgtaatagtctgttctcacattgctataaagaaatatgcaagactgagtaatttataaaggaaaaaggtttaattgacccacagttctgcatggctggaaaggcctcaggaaacttacgatcatggcagaaggtgaagagacgacatgcgagataggtgagagagagaatgcacacataggaggaactgtcaaacacttatgaaaccatcagatcttgcgagaactcactatcatgagaacagcgtgggggaaaccacccccgtaatccaatcacctcccaccaggtcctgcccttgacacatgggtattatggagattacaatttaagatgagatttgggtggggacatgggacctaaccatatcagagattaacttgatattcccacaagtagggcaatacctgctcagataaatttatgtggtccacaaaatatgcatcatacataataggattagaatatctgagaaaatatatcccaatatacacatatttaacataatctcacaggaaatcccgatttctttctattgcatcaaatacaagcaagtacaagccttaactccatattgtataactgtaactcaaacattcacattgtagtttttaagttcacctagttgccacagaaacacttgaaagataacaaaatcctaagctccaacaaccatctgagtggatccccacttggccaaggggacaccagagcaaccttgaaaactgagttcttggctacagtgggatgggaagtcagacacccctccctggctatacaccattagggttacttccctaagtgctaagcagaaaccaccctttcaaaagattccaccactgatatcaaccaaccacctgatgctgcccctcttctactaactgatgagagacctctggccacagagttgtcatggccagtgtatggagaatctgcagtcagggtcttcatgtcctcttcttcactgcttgatgtcagagggctgaaaactccaccctcagattgtgctaatgctgccatttttgtacgtgggatgcaccaggggatgtaaaactcaattgcacatgtgcgtgtttctcctttcataaatactcatgactcttcctgaggcttattgaatatgtatattcagtcaccccactcagcataaattcctgttgctcctcccttgaagaatcttttctggcttctggcttaaggctaccatatgcttcccaggctgtctgaatggccatcctgcaggctgcaaccctttatgagaagtaaagctctccttttcaaatttatgaacctcttctgttgacacacttcaaactcaagaagtctcaaatgaaacaagtttcaaaatctcatcccataattccatgttttctatcttatttaatgggattcacccagaaactaaaaccaaaaatctaagctatagctgtatctcttccttatccctttttaatttgtttatttacttatttgtacacgaataagttctttagtggtgatttttcagattttggtgcacccatcacccaagcagtatacactgtacccaatggttagtcttgtatccgttgcctcccttccacccactcccccgagtgcccaaagtccattgtatcattcttatgcctttgcatccttacagtttagctctcacttatgagtgagaacatatgatgtttggtttttcattcctgagttacttcacttagaataatggtctccagttccatcaaggtttctgcaaatgccattattttgttcctttgaatggctgatacacacacacacacacacacacacacacacacacacacacacacaccaaatttttttatccactcattgattgatgggcgtttgggctggttccatgttttcacaattgtgaactgtgctgctataaacatgcatgtgtaagtatcttttcatataatgacttcttttcctcttggtagatacccaggagtaggattgatgaatcaaatggtaaatctacttttagttctttaaggaatctccacactatttttcatagtggttgtactagtttacgttcccaccaagtgtaaaaatgtgttctttgtatcacatctatgccaaggtctattattttttggttttttgattatggccattcttgcaggagtaagatggtaccatattgtggttttcatttgcatttccctgatcattagtgatgttgagtatttttcatatgttttttggccatttgcacgtttcttggccattcttcttttgagaattgtctattaatgtctttagcccactttttgacttgattgtttgtatttttcttgctaatttgtttgagttgcttgtagattctggatattagtcctttgtcagaagtaaagatttttaagactgtctcccactctgtgggttgtctatttactctgctggttatttcttttgctgtgcagaagctttttagtttaattaagttccaactatttatctttctttttgttgcatttgcttttaggttctttgtcacaaagtctttgcctaaactaatgtctagaaggatttttccaatgttatcttctagaatttttgtggtttcaggttttagatttaagtctttgttccatcttgagttgatttttgtacaaggtgagagatgaggatctagtttcattcttctacatgtggcttgcaaattatgccagcaccatttgttgaataggttgtcctttacccactttatgtttttgtttcttttgtcaaagatcagttggctgtaaatatttggctttatttctgagttctctattttgtttcattggtctatatgcctatttttataccagtaccatactgtttttgtgactatggccttttagtatagtttgaggtcaggtgatgtgttacctccagatttgtccttttagcatagtcttgctttggctatgtgagttcttttttgattacatatgaattttaggatttttttcaagttctgtgaagaatgatggtggtattttgatgggaattgcattgatgggaattgtgttgatggtaatttgatgggaattgcattgaatttgcagattgcttttggcagtatgatcattttcacaatattgattctacccatccatgtatatgggatttgttttcatttgtgtcatctatggtttctttcagcagcattttatagttttccttatagaggtctttcacctccttggttaggtagattcctaagtattttactttttatttttgcagttattgtaaaaggggttaagttattgatttgattctcagcttggtagctctttgtgtataacagtgctactgatttgtgtacattaattttgtatcccaaaactttgctgaatttatttaacagttttagagggtttttggatgactctttagtcatccaaatgtctctagggttttctgggtacacaatcatgtcatcagaaaacagcaacagttggacttcctctttagctatttggatgccctatatttttttctcttgtctgattgctttggctaggatttacatactattgatataggagttaaaaagaaattaggcagatagggatggtaagagagtcctcaataaggttttccttttaatggagagcagcagcccccaaattatctcttttctgacaaagagcagcctgttaaattgaactgcagacatagataagcaagctggaagcttgcatggatgaatgccagcagctgcaccaacagaaaaaggctacctgggggcaaggcatgttcaacatagtggctccatctgcccttttctttgtcgagcacatgtacagtaagaaacagacaacatggcactggccaggtagagaacccatctgcataacaaaagattaggatggggtgaccaggttattcatgcactatgtaaatggcacacacagtcccatcaatctttaggccctatgtaaatcaggcactgcctcctcaagccagtctataaagctccgtgcactttgccgtggactggaagacccatttgggagcccttctttctctgcagaagagagagctattctcttttctctttcttttgcctattaaacctccactctgaaacttactgtgtgcctgcatccttgatttccctggcatgagatgatgaaccatggatatttaccccagacaatgatgctgcttcagtatgttgaataaaagtggtgaaagtaggcatacttgtcttgttccagttctcagggggaatgcttttgatatggtttggctgtatccccacccaaatctcatcctgaattgtagctcccataatgcccacatgttgtgggagggacccagtgggagataattgaatcatagggtgggtctttcctatgctattctcatgatagtgaataagtctaatgagatctgatggttttataaaggggagtttccctgcacaaactctcttttcttgtctaccgccatgtaagatgtgcctttcaccttccaccatgattgtgaggcctcccaagccatgtggaactatgagcccagtaagcctttcttttgtaaattgcccaatctccagtatgtctttatcagcagcatgagaacagactaatacagtaagttggcaccagtaaagtggtatgctgctgaaaagatagccaaaaatgtggaaacaactttggaattgggtaacaggcagaggttggaacagtttggaggattcagaagaagacaggaaaatgtgggaaagtttggaactccctaaagatttgttgaatggctttgaccaaaatgctaataatgatgtggacaatgaaatccagtctgaggtggtctcagatggagatgaggaatttgttgggaactggaacaaaggtgactcttgttatgttttagcaaagagactggcagcattttgcccctgccctagagatttgtggaactatgaacttgagagagattatttagggtatctggcagaaaaaatttctaagtagcaaaacattcaagaggtgacttgggtgctgttaaaggcattcagttttataagggaagcagagcataaaagttcagaaaatttgcagcctgacaatgtgatagcaaagaaagtcccattttctgaaaagaaattcaagacagctgcagaaatttacataatttacctaagtaatgaggagccaaatgttaatccccaagacaatggggaaaatgtctccagggcatgtcagaggtcttcatgacagctgcgaccaacacaggcccagaggcctaggaggaaaaagtggtatcaagggccagacccagggttcccatgctgtgtgcagcctaaggacttggtgccctgtttctcagtggctccagccatggctgaaaggccccaatgtagagcttgggccacggcttcagagggtgcaacccccaagacctggcagcttccacatgatgttgagcctaccagtgcacagaagtcaagatttgaggtttgggaacctccacctagattttaaagtatgtatggaaacacctggatatccagatagaagtttgctgcaggggcaggcactcatggaaaacctatgttggggcagcacaaaagggaaaaggggtgggtgcctccacactgagtcctcattggggcactgcctagtgctactgtaagaagagggccactgtcctctagaccccagaatagtagatccaccaacagcttgcactgtgcacctggaaaagcacagacaatgccaacctgtgaaagcagccaggagggaagctgtaccctgtaaagccacaggtgcagagctgcccaagaccatgggaacccacctcttgcatcagcatgagctggatgtgagacatggattcaaaagagatcattttggagctttaagatttgacttccctgcttgattttggacttgcgttggggcctgtagcccttttgttttggccaatttctcccatttggaacagctgtatttacccaatgcctgtacccccattgtttctaggaagtaactaacttgcttttgattttacaagctcataggcagcagggacttgccttgtctcagatgagactttggtctgtggacttttcagttaatgctgaaatgagttaagactgtgggagactgtggggaaggcatgactggctttgaaatgtaaagacatgagatctgggagggaccagggcagcatgatatggtttggctgtgtccccacctaaatctcatcttgaattttagctcccagaattcccatgtgttatgggagggacccagtgggagataattgaatcatgggggcgggtcttttccatgctattcttgtgatagtgaataagtctgatgagatctgatggttttataaaggggagtttccctgcacaagctctcatttcttgtctgccaccatgtgagatgtgcctttcaccttctgccatgattgtgaggcatccccagccatgcggaactgtgagtccattaaacctctttcttttgtaaattgcccaatctcaggtatgtctctatcagcagcatgagaacagactaatacagctttccacttttccccattcagtatgttagctgtgggtttatcatagatgacttttattacattaaagtatgtcctttctatgcctattttgctgagggttttaattataaagggatgctggattttgtcaaaggctttctctgcattgattgagatgatcatgtgatttttgttttcaattctgtttatggggtgtatcacatttattgacttgcatatgttaaaccatccctgcatccctggtatgaaacctacttgatcatggtgaattgtctttttgatatgctgttggatttggttatctagtattttgttaaggatttctgcatctatgttcatcagggatattggtctgtagttttcttttttgtcatgtcctttcctgtttttggtattagaatgatattggcttcaaagaatgatgtaaggagtgtttcttctttctatatcttttggaatagtgtcaatatgattggtacccattcttctttgaacatctgatagaattccgctgtgaatctgtctggtcctggactttttttgttggtaacgttataattaccatttcaatctcactgcttgttattggtctgttcagagtttctattacttcctggtttaatctaggagagttgtatatttccaggagtttatctaggttttctagtttatttgcataaaggtgttcacagtagccttgaatgatcttttgtatttctgtggtatcagttgtaatgtctcctgttttatttctaattgagcttttttggatcttctctcttcttttcttggttaatcttcctacatggtctgtcaattttatttatcttttccaagaacaggtctttatttcatttatcttttgtattgttttggttgtttgtttcaattgcatttagttctgctttgattttggttatttcttttcttctgctgggtttgggtttagtttgtacttgtttctctagttccttgaggtgtgaccttagattgtctatttgtggtctttctgagtttttgatataggcatttaagactatgaactttcctcttaacactgcttttgttatatccaagaagttttgataggttgtatcactattatcattcagttcaaataatttttaattttcttcttgatttcattgttgacccaatgatcattcaggagcagattatttaatttccatgtattggcatcattttgagtgttcttattggagttgatttccaattttattccactgtgatctgaaagagtacttgatatgattttaattttcttaaatttgttgagactcattttgtggcttatcatatggactatcttggagaatgttccatgtgctgatgaatagaatgtatattctgcagttttggggtagaatgttttacaaatatctgttaagtctatttgttctagggtatactctaagtccattgtttctttgttgactttctgtcttgatgacctgtctagtactgtcagtggagtattgaagtcccctgctattattatgttgccctttttaaactcctatgtgtcaattaaagacaggctttttccatctagtgaatccaccattccccagggccttagagtcctaccttagatgggaaaactagaccctcatagacggccaattgctccttcacatctcagtccagatgcatggggcccagaaaatgtagttcaatgatttgacaagaagagaaaaatgttggtattagggagttctagaaatctttgccttcagattacagaagatagcttttatcttccgactatattttaaaatttaaatggtattaatgatattaatggttactaatgtctttctctgttttttcatgccattctattttatatgtaataaagaacttaatatgctgttacttttcttgcctttctcatctgctgttttcaatgttcagtttattattattgttaatattgttgttatgatataatttttttatgcaactattttctctaaatagcttcagtacttatcagcaattcttaaactttcccaatcttgagttctggatcttgattaatctttctgtcttctgaagaagattattggatagttttatcatgaaacttaaaaagatcaattaattagttttatgttctctaaatgtttggtgatataagaaagtatttctctcatctttgcacattctcttaaatttgcccaaataagaaagtatgtctgttgtttttacacataagtaaccatttaaatgtgtataaaattcttggattaaactatttcccctcaaaacttgttgaaattgttccattgtctttcaacatttgacattccacataagaagtttgaagcttatctgatttttttctcctttataaatgttcctaatttttggtttacctttaaaatgtttcaatattccatgatatgtctatgtttggatatattgtgattattttggagaaaactgtattagtctattcagtttgtagacataagtcattttgggtaaggtttattggggcatttcatatccataattatttattgcatttatttttaaggtaattagactttttctgttctcgatgtctataatttttactttcactgatgtccttgtcattttcctgttaattctttgatattgtgcatttttaactctgctcatttctgctttcaacgtacgttttaattctgccattgctttacatggttccttgctctcctttcttatttaaggcagacccctttacatctctgtctttgtggctgtctttttatgattttacaaacctacttcatagaggcttctttttcataaagtaatgtcccttttttatttttggtacaccatgcaaatattttataaaacctccatcccattgtcatagaagtaatatacacaaaacttctgccttggaaggttctagacaagatttcccttgtcttatgctaggaagaagccttgtaacttatgtttttctatttaaaaaaggagagatacattcagacccagcttttctcaatagacagggagggtgaaatttacttgcctcttcattcagctgtttccatgttaatagccttcctctctcagaggtaaaatcaaggtcatcagcctttaattttgtgctggtctattgaactgaagatgtatcttctgtttcttagatggttcactgacttaggaagagtacatcaaagtttaaagaccttatttgagcaatgaaaaagatgcttctatgcatgtactgctcccagaacttctcatgtgataaccaggaacatgtataaaattgtatgtgtttctacatttttctatgttttggacttccaagtgtaacatccacatgagtggagaaacaagtgttgaagcaaatgttggaaacagggagaataggccagaaatccggtacttgttacccagaagtgctgcctgtttctgttctcaagagcctccatatcatgcagtaagacataaacaatggaacggaatcaccatcttttcctgttgtcctaggttctgttctgtttcagagggactggcatacggtgcatggctaagaaaggacatttaatggggtctcatccagacattgacatgtgatctttgctcatcttgaacttgtgctagtggaaatatatttaatgtatctacataggtatattaattggaacttgatagtgcagataacaggcacatttaataacccaagtgaaattaatttatatacgtaagtgaagtttgaaagcatttcattaatattatatctttagggcttgactttataatcagcctgctcacttaacaaactaaaattcaacataaactacaaatctagtacactttgcattataccatagcagccacaaattaatgagtaataaataatgctgtgagacagtagaaaatgatgctagtaacagaagaaacgtttgcactcactacacccatggctttgctgtacttgacgaatattatcattcaggaaaatgttaagggattttaatagtcagttcctgccgatgatcaataatgacctcattattgcatgtgcttacatttttgtgacatcagaggaaagaaacactgcaaaacccagaattttccaaattaattgctaaaggtcttccaatacaaactcttccaactacactggcacatcatacccttttaactatttctagagctaaagtgaaagcagtagtgtatttaggaaaaacaaaaagaaaaacctagtattcagtttttatgcaaaatcaccaagactttaatgtaaaggggtcctttaaagaaacatactattctcaaagctatattactttatatggccatatgctgggatctcacatataagtgaaattggacttcaatagccataaggagaaatgccactttttcctcccaatccttggactaatgctgtttaactttttttctttttttttttttcctgagacatggtctcattctgttgtccagcctggagtacagtggcacgatctcagctcaccacaacctctgcctcctgagctcaagccatcctactgcctcagcttcctgagtagctgggactacaggtgtgtgccatcacacctggttagtttttgtgtttcatgtagagatggggtattgccacgtttcccaggctggtctcgaactcctgagctcaagtgatctcagcctcataaagtactaggattacaggtgtcagccactgtgcccagcctgagcaatttttgatgcataatttgacatgaaatttcagaaggcttgtaagccaacactccacccccatcctaacaaactaaggtaatcgtttctgcttaaaagtctctgaaaataatactgatgtaagtagagcagcataatacttcctacctaagaaaatatggctgttttcatgttctcttgttaaagaatcattgtgggcagataatgagaagcagagcctaaggaaaagaatggataaattgggaggaagaggagaaaaaataatagactggtctttgaaaggataagggttgaagaattgatgagttatatttgcaagacagttagtgattgattttggtatcttttaaaggcttctctacattatagaaacacattgaactagaagagaaggatgagagccctgataaaaatttaagtattatcctgagccagtccttaaggggagcatgctatgtagccctgctacattgacaatgtatataaaaggatatctttctaagcatccttctaggtatcagttagcgaatgttgttagcaagttaaaaaaatgtctctaggatctgtgtcaggaaatgctcttatttgtattagcctagtcttctctctaagattatgttacttatgagcagaagttgttctatgtactgtatactttcattttcatcttagtttcctttcataagtgttatatcaaagttctgatgattcattgaataattataagtagcaaaattaaaatatttaaaggaaattaaaaagatgagacttttataagactcatattcctacataagactgcaattaattatgagattgggaaaaaacgcaaattattaaaaaataaaaactgaccaggtgcagttgttcatacctctaatcccaacagtctgggaggctgaggtgggtgaatcacttgaggccagaagtttgaggccatcctgggaaacatagcaagaccctgtgtctacaaaacactgataaaaattaactagtgtgatggcctgagcctgtagtcccagctacttggaaggctgaaacaggaggatcgcttgagcccaagacatcaaggctgcagtgagccaagattacactactgcactccagcctgagtgacagagcgagactctgtctcaaaaataaataaataaaataaaaactatcaccaccagcaccaccaaaaaggagatctcataagctttttttaacatttccaaaacaaaggctctctaaacttctttttttctcattctagaaagctaatgatagaattttttttttcccctgaaagcctcagctacattcaccatgtcctgcatttattgttgacagctgttcaagacctacaaggtgaagttgaatattacacacttttttggagttctgctacctcaaacgactctctaaaaatcttgccagatgtaaactctcatgtcattggccacctaaagccaaacacagagtattggatctttatctctgtcttcaatggagtccacagcatcaacagtgcaggacttcatgcaaccacttgcgatgggggtgagtccagattctaaaggatatttgcctcagagatgcgaatgaaattgattgattcttgccggggttgagatcagtcatccctccattataaaatttccggtgtgggagggaagggggtggaggctaaaatgcttaagtgctcactgtcatcagtagcagatcaataagcagtcccattgagacagaagcacaagctctaataatgagatattagcccagtttgttcctgttcttttcagtgtatacttattttagaactgagttcacatcaataaatggtgacatttagaaactttttttttaagatttgccctcagaagcagtacgtttttcaaaacgacagccaaacacagtgagagccctccctgagtcaccagaaatggtaggtggaagttcagccactgagaaaaattgcctgtgactcatttctaagccagttagcaagggggaggaagcaagggaagcaacttgtgaatctgaaatgtgtttggaatggtctttctaatcttttttggctttataaagtctcattataaacattataatatcattacctcccaagcaagtgttccaggtcattagcagagctctttaagtgtggaacccatttccctttgtggtgccaaaggtcggcaccttttgtttataaaatagggtagatcacaaggacaattcttcaactagttaagatgggttcttatgataaaaataggtctttgcatagttatttctgacatgcttgaataattatgcaatttaacgctaagcaagatttttttcttatgttagatttcatcattacctatggtaatcaacattcaaaatcatttacataatgacaatattgcattattgcttcatattgcttgagttacaagctagtaacatcaaatgatttttcacgttccaccagcctcattgtatttgagttttattttttgctcaaggagcaaattttatttccttccctccctcccctgcaccttggaggtatagagtgaaaggatggaaaaaagacaaaaaatagataagtgttagtggtgcagatgggtgaataatttatcatcatatcccactggtcacatagtattgaagattagcactatgctggtggtataaagcattttaccaccaattcttatggtttctaactgagagtataataagccaatttacagaggactacagactgtgataacttcatcagcgaaaagcagataagcgaggaaccctttgctaaacctaaatactaatctgcatttagcttaacatgtgctttttcagagacagctggagtttattcagtttcttcctttaattctagagcctcagggcatgcttcctccagaggttgtcatcatcaacagtacagctgtacgtgtcatctggacatctccttcaaacccaaatggtgttgtcactgagtattctatctatgtaaataataagctctacaagactggaatgaatgtgcctgggtcgtttattctgagagacctgtctcccttcactatctatgacattcaggttagaacattgttttttgatggttaggcttatggatatgttaaataaaacatgccaggctatgtcttcaagtggatatcttctgtcttggttacagattatttctttggtggggaagggaaaagagagaagggaaattgatcagaattaaatctgtgtgctgtaggcaaacatgtgagtctctggagagaagataatgataatatggaaaacgatggtgatgaggatggtgatgaaattctcactggcaaaataaagctaatcatgtattctaaataaatcttgttgagcagcttaccttttcccaggatcttttactgaaatcaaaatcagaatcagtttgtaaatgtggagatgtttttttctcttcccatttctcctatttactaatttaatatctccagagaagttatgaaacttcacttggtgtcaatttcctcttttgtaagcgcaatggactagatgtcttaaaacattctagccacctctagcattctgtgattctgaatgcaacaggaagacatatataaaaaatatagcagacaaaaaatattaaaaggttttatctgaaggtgaaagaaatatatttattcatcactcaaaaaatgttcaatgttctccgcatatgtgagagcaattgtggttaaaattttttgcccttggacttctttgagaatcttatgaagtcagtgtactctgccttagaaaaatatttatgcacttgtatgacaaaatttaacacataatttcagaaagtgcactgatcacttgaagtcaaattcatagacttcttcaggggctactggccttaaaagtagaaaaagtatagggaatactaaggcatataaaacaaggaacttatcttcacggaattggaaatcttgttggagtaccaagccataaaagataacaaggctaaatgtgcaaatgagtgataaaaaaaaatcagagtatttcagaaaccccacatttagagaaagcttgcaatttacaaaattttttaataaactatgctacttctaaaattcataagagcttcgtaagataattttcagaagatattaagcacagaaattttatatgaccacagaaactttttactggttctatccatttaatagtactacctcattcaggtttccatctccttttcctgacatttgaggttaagacatataatcatctggctacaaccaacactttagtctcccctactctgactcatagacctagcttcctaagaaaaccaaataaaaatatctttgaataaagaagaaaggtacattaattatttttctttttttttcatttaaatgtattttattttaagttcctgtatacgtgttcaggacatgtaggtttgttacctaggtaaacgtatgccatggtggtttgctgcacctaacaacccatctaccaggtatttacctgtacatgtattattagctatttattctgatgatctccctcccctgatgcccccccaacaggccccagtgtgtgttgttcccctcgctgtgtccatgtgttctcactgtacagctcctacttataagtgagaacatgtgatgtttgtttttctgttcctgtgttagtttgctgaggataaaatggcttccagctccatctatgtccctgtaaaggacatgatctcattcctttttatggctgcatggtattccatggtgtacatgtaccacattttctttatccagtctataattgatggacgtttgggttgattccatgtcattgctattgttaatagtgctgcaatgaacatatatgtgcttgtatctttataatagaatgatttatatttctttgggtatatacccagtaatgggatggctgggtctaattgtgtttctggtcctaggtctttgaggacccaccacactgtctttcacaatggttgaactaatttacattcccaccaacagtgtaaaagcccttctatttctccacagcttcaccagcatctgttgttacttgacttttcaataatcaccattctgactggcatgaaatggtatctcactgtggttttgatgtgcatttctgtaatgatcagttatgttgagctccaggtgcccaccaccacaccaggttattcttttgtgtatattttcagtagagacagggtttcaccatgttgaccaggctggtatcaaactcctgacctcaggtgatccacctgcctaagcttcccacagtgctgggattacaggtgtgagccactgcacccagccaagtatctactttttgaataatccctttatatgtcccttttacaaagaaataataatttcatttttattcagttttacctctttttaatataaatatagtaagctttatatgtttgttggccgcataaattcttctttggagacgtgtctgttcatgtcctttgcccattttttttgatggggttgttttttcttgcaaatttgtttaagtttcttatagattctagatattaaacctttgtcagatggatagattgcaaaaattttctcccattctgtaggttgcctgttcactctgaggatagtttctgttgctatgcagaagctctttagtttaattagatcccatttgtcaatttttgcttttgttgcaattgtttttgatgtttttgtcatgaaatgtttgcctgtgcctatgtcctgaatggtattgcctgggttttcttctaggatttttatagttttgggttttacatttaagtctttaatccatcttgagttactttttgtataagatgtaaggaagggatccagtttcaattttctgcatatggctagccagtttttccagtaccatttattaaatagggaatcctttccccactgcttgtttttgtcaggtttgtcgaagatcagatagtggtaaatgtgcagtcttatttctgagatctctattccgttccattggtccatgtgtctgtttttgtaccagtaccatgctgttttggttactgtagccttgtagtatagcctaaagtcaggtagtgtgatgcctccacctttgttctttttgcttatgattgtcttggctatacaggctcttttttggttccatatgaactttaaagtagttttttctaattttgtgaagaatgtcattggtagtttaatgggaatatcattgaatctattaattactttgagcaatatggccattttcatgatatttattcttcctatccatgagcatggaatgtttttccatttgtgtcctctctgattttcttaagcagtggtttgttttcattgcacaccatgattcccatagcctacctgagttgtcttagcatggaatatgtggactgatgtttatgttcatgattcttatggtgagtccatgtatgcaggtagaccataggccaaattatgaaatagaaatcatgctccaaataaattagaaatatagctatataaaaaaggctaacacaggaaggtgatggaggatttgccgtattgtcttcttttgaccagtgttcgggaaagctgagttttcaaaggcaccttattcatttgctttaccaagactcgaaacacacaacctagaagtgagaacactgtgtgctgtgcatgcatgtgcagctcagctttctgactctggatcaagagttaacgtttaaaagtgtttaaggcctattctatggaaaaggctttatttataccactactggtttgagtcaggtataaataactcaagccagtaggtataaagcctcctcttctggtagcctgaggagagtggaaacagatgaaaatacaaaagatcaaagtagaatccaataatagaattttgttattagtgcctaagatattcttattactgattactatattttttgtgaagctttttgcagtccaggaatactgtacttgatatagctgttgcatttctggaaatttgaacatcaaatttcagtgattttcattacgatgtcaaaggtgatttagtttcatttaaaataagcatttgattggaatgcctaatactttagaattaaggctctctatgctaaccccatctgtaaaatagctattgattttaaagcacataacacactcaagtatctacttttttttttttttttttttttttttttttttgagacagagtctcactcttctcacccaggttggagtgcattggcacgatctcggctcactgcaacctctgcctcctggaatcaagagattctcgtgcctcagcctcccaagtacctaggattccaggtgcccaccaccacaccaggttattcttttgtgtgtattttcagtagagacagggtttcaccatgttgaccaggctggtatcaaactcctgacctcaggtgatccgcctgcctaagcttcccacagtgctggaattacaggtgtaagccactgcacctagccaagtatctactttttgaataatccctttatatgtcccttttacaaagaaataataatttcatttttattcagttttacctctttttagtataaatacagtaagctttatatttgtgtttcattcacatgttatacaatatcgttttagcactagaaataggtcccaaaatggagactgggaatgttaacattagtaagaataaaaacatattggcacatttctctaacatttgaggttaaaacatatataatcatctggctaccagcagtagtcattggtcattttcctttgaccaatgaatcaaaagaaatgttttctggagaaacatttgaatatacctaagtagtttagagcttaaagttatgtttaacatttagatgagaagccagtagggtacagtggagaacaactcagatatcccaaatcttaccagcttgacaatattccctggcttctctgcaaatttgtttaaatggagttatgaggaatcaatacgattatttgtgcatatatccattataatatttggcacatattagatacataataaattcagttgaattgattctgggttatctcattatgtatcacagaatcaaatttttccaatatgtataaagttcattttcattaattatattacagcattatattttaagttcatctgcctttatttcagatttaattggacatgctcagaatgtaggcccttgatagtgtttaaatatccactattaatacctcaaaagactatatggcatcaataagtaacacaactcatacagcattatgaacatatgcctcaactaacatttaggtaccctatgaataaaatagcatatctagtaaatacaagaatcccatttgcctttcctcaaccaccaaaggaacagagaactgtttcacataaaagctcggaattaatgtttaagattcatcagtacctagcttgccttctctatttatatattagatgcttaaagtaaattagcactgtaaaaagtacagtttctctttggtttatcctttaattgagagcagaatgatatcgctttgcagatgttcccaatcttttgcatattcatttctctctcctccctcttggttaacgtgttccttttgtgtgactaatgcttgatgaaccccatttctaatcttcagttattccaccctcctcggtttttattcagattaggtggcagaattaaagggatgaatgatgattttctgctgtgattaaggtaaaaatacaattgcatctggaacaaatggatataaaatacctcagccatattggaaggcttctctaggcctcatttttcctccattagacattagcatttaggctatttgttttacagtgtcaagacttccagaagataccatcattacactacttagttatagatttagagaacagtgagcagtgataacctgttatgcttgcaaactgtcacttgggcatcttccattccttgactatgctcttcagtagattaatgtatctttctctttgtgaatagttgcaaccagagagtaaacatcatcattcccattactaaatcaattatcttgatcccaattccgtaccttcctctgagctcattcctttggagtcagttaacatcaaaaatgaatattgattaaacctcaagaggctatagagaaatacaagagattcatgtgaaatgagggaaggtgggattcagactattgttagtaagtatttcaaaaatggttgcatttattttttctaaactaatgtttgcaggttgaagtctgcacaatatatgcctgcgtgaaaagcaatggaacccaaattaccactgtggaagacactccaagtgatataccaacacccacaattcgtggcatcacttcaaggtacaaaattttgtgtcagttaaatctaaggaactctgatcagaagaaatgaaaataaaaatcaaaggtatcctctcagccatgacaatctcatttaatgggttattataagtatgtgtgtaaatcaaatttttgatattatttcacagatattaatcttcactggacatccaatggcatttaatctttaatttccctgattgcccagcctcagatttcttatttagtaacctgtaagcaaatacttgaaatacatgtctccttatttgaatgtgtcctttagtgaatccttttgcggagcataatacaagcttaattgtaatgactaccttctaacttaatctttttgaaaaaaaattgatttatatacatcagagtgccctaaagctagaaatctgtaaaattagtagggcagataatgtttagataagcattaccaattttgtcagcttcttggtagaatcactttatttttctttattcttttgttgctgagaaatgaccatagtttgaaagcgagtctctttataattcataattagtaacaacaacaataataataatatttggtattgtttccaaagctgaaaataagatggtaaattgttcatccgtttgtatcaagttgaggctgggaaaagaaatcttagtgctttcacattatactttttgcttaagccaaatgaatcacccttctcttacatgtgcaaacaacacacacacacacacagacacatacacacactgaaataataagtctattattaatgtttcaattctgaaggatttctctatgacatgttgaaatttctggatcttaaatcagttcaaaaaattagtactggttttggcaaccaatggttaaaataattagaaaaattcaactaacctgactgttagctgttcgtggcaataatcatatcttgtctgcttgagtatatcttctatcaaacacatgatagatactgatctaatttttggcatactaattagtttataatccccccagcagatatcccccaacctattcacagtattatctactatgcagggaggaaatagtcatattaaatgggcgttagagacctttattctttagcaaacacatctgtggctataataatatagaaggcaaggtggggcgtggtggctcacgcctgtaatcccagcactttgggaggccgaggcgggcggatcacaagctcaggagatcgagaccatcctggctaacatggtgaaaccctgtctctactaaaaatacaaaaaattagcagggcgtggtggggggcacctgtagtcccagctactcgggaggctgaggcaggagcatggcgtgaacctgggaggcggaacttggagtgagccgagatcacgccactgcactccagcctgggcgacagagtgatactctgtctcaaaaaaaaatatatatatatatatatatatattatatatatatatataatatatattatatatatataatatatattatatatataatatatattatatatatatatataatatatatacacacacacatagaaggcaaaagtaatacaaaagagcataagacatgattctaaatttgcaaagttccagtccactggggaagatactcccctaaataaatgtttatagaacaatgtaaaaaacactataataagaggtttagatgtgcaagaacataaagagaaaaatagcaaactttacccagaattatcagtgaaggcatcatggaagatgtgacctttgacttcagtcttgaaaagctcaaggaagaattatagttaggtgggtggatgttttcaaattcttgtctgctggcatccccatgactcaagcccatgtgaatgacgtaacagaatatgcctcatagtacatatttatttataactaaaaataacgtctaagctttataagaaatggaacaaatgtgactgtgtctctaggttttttttcctttaagaagattattgcacataataacagaggacaaatatttttagttgctattaaaaattgcttgtatccaaatacattaaattgatgacagaaacattaaaaagagtattatacaacaagaacaaggaaagtgagagaggagacaacaacagaaaagagattgcaacacaattttgtaagcaatatttgtcagaaagaagcaaatgatttaatacagtggagaaatttacaaccaaaatattggttgacaaaagacaataatgacaggaaacaaactgttttttccacagagaactggagaggctgagcacttagaagttttaaggatgtaaagaggaggagagagggtagggtttaaagctgaaatcatggggtgagacacaactgttaacaaataagtgtttggaatcccaggtctcttgcatctttgctgtgcatccaggggtctatttctcttcctccacatgacaaagtccaccgaccaggagattagacatttattctctggagaaactgagggctactaggcagaggggagctgagatgagacacagaagtaaaaacagtgataaagtgagactacaacctgaatggtgggctttttggctaagtttcccagttctgccctcaaaagcaagtagacaagtcataaacacctccagataggaaactgaacatagttttctagaaaaaaaagaatgatctcaaaaaaaatacctccagataatagcatatagggatccctaacagtaaaaacaacttgtcctctggtcacccagtagggaagtatgccaatcaacaaggctcacctaactataaagcttttagtcagctttttttttttttttttttttttttggtgcatcactcttaaagataaaaaggggaccaaaataaacaaaagacatgatacaatagattcagagataatgcaggtgaggaaaaaaaattatagcctcagacagataaaagaaaattctctaaccataaaacaaaaccagcatacttaaaaaaataaataaataaccaacgaggagaaaacttcatggaaattaaaagggtgaaaagctgaattgaaacttttgaagaaagttcaagggaatgtctctgaaaatgcaatgaaacacaaagatttaaaagagagagagacaaagaaaaaacaatagagagtatccaggaagtctaatatttgaataataagagcttcaaaagagaatcaaaggaaaagagggagaaaatttaaaaaaaaaaaagacaagaaagtatcccagaaccaatgtactactgtgcagatcaaaagattccctggataccaacaatatgactaaaaagtgattacatataaagggatattatcaggaaattgcagagtaccatgtttaaaaagcacatccaaaaagctgccaggaagaacagacactaccacaatcaggatgtgaagcagcatcatgatgtcggtctccattattgctaacccctcttctacccttcctaaaactaagcaaacactgccatgttttgttatgtataattctgccttttccatattgtcatgtaaatggatcacataatatgtagccattcaaatggcttcttttagttagcataatgcatttaagatttgtccatcttattatatacatactagcagttgtatacatactagtagttgtcagtttttgttgctgagtaagattccattatatgaaagttctacagtttgtgcacagtttggataattttcagttctccgtgaccacgattaaagttgctgtaaaacatctatatacaggtttttgtgtgaagatatattttcatttcatgtgggtaaatacccaggagttggattgctgagtcataaactgccagactgatttacaaagtgactgtaacatctttcattcctactagcattgtatgagagttcaagttgctctacatttttgctagaacatgagatactatgaggtgttttcctcttattttttaaatagtcattttaatagatgtttgtggtgtgttattatggtcttaaattacattttccctaatgactaatgatactgataagctttgcaattgctttttgcatgcactttggcatttgtttactctgggaaatggtatctccaaatcttttgcaaatttcttaattagattctttgttttcttattttttgagttttgaaaattttttaaatatattttggatttgagtttttgtcacatatgtgatttacagatatttcttctctaccttatgatttgttttcaattatcttatttgtgtgtttttaagagaaagagttttaactttccaagagagttagatttgttactttttccttgacagtttgtgcatctggtattttatctaagaactttttgcctgagttaaggtcacagagactttctcttgtctatttcctagaacatttgtatgtttacatgttgaatttatgtctatgattggttttgtgttaatttttgtatacactgaggcatgagtcaaggttaattttttttggcatgtaagtatttaatagtatcaacaaaatttttggaaagattatcttttctttattgaatatttttagatttttgtcaaaaatcaatttaaacacgttttgtaggccatttttggactctcttttatgttcaatttatcaatatgtatatctataccaatatcgcacaatcttgattactacagctctatagtaagctgtcaaatcacattgtatgagtcctccaactttgacctttataaaaatcattttggcctttctcactactttgcctgtccatataaatttcagaaacaggtcattgatatctacaaaacatgtgattttgattagaactgcattgaatttgtggatcaattggtagagaattgacatcttaacaatatcaaatgttctgattcaagaacacactcttgctcatttatttgcatcttctttcctttattttatcagtgttttatataatccagtatgcaaatactgcacatattttattaagtttatacctaattacttatttggggggtgctattattattgtttctttaaaacaaattcaaatccaattgttgctagtgtgtagaaacacaattaattttggaatagtgagcttacatccagcaaacttgctaaactccttgtaagtcttaagagcttttttgtaattccctagtctatatagatcttctacaaagagaaactgtttatttttttcatttccaatcagtatgtcttttatttctttttcctgccttattgcactggatagtttaataacgtgataagagcatatccttgacttgttcccaatctttgaaagaaaactttcagtcttttacccttagatgtgatgttacgtatgaaatttttggccatgccttttatcacgttgaagaacttactttttatttttaatttgctgacaattttcattataaatggacatggaaatttgtcacatgcttttttgacattttaaatttgtactatgatcgattatatttactgattttaaattattgaactagtttgtattcgctggataaccagaacttcgttgtgacatattttcttcttcatatattgggggatgcaatatactattatcttatagaaaatgttcatctgtgttcataaaatatattggactgtgtttgattttcttgtaatacctttgcctggattgggtatcatggtaatttctggtctcatactaacttgggaagcatttccttcttttctattttgtggaagagattgtacaaaagtgttattatttcttaaatcttggtaaaattcaccagtgaaacccatatttgcctggagtttttctttgatggaaggttttttaacttggaattcaattcccttaataatgtatgatatttggcaatttattctccagtgagtttagtcatcttgtgggtgcagaaaataggttaatttaatcaaatttgtcaaatttattagcaggaagttgtttgtagtatgtttgtactacaaacaacaatttgttgcaattgattttattctttcatttctgatattggtagtaagtgcccccgtttttctgttcagcctagagttttatcaattttgtagatcttttcaaagaaccatttttggctttatttattttctatatcatctacattgttttctattttccatttcagtgatttctgctctctattgttttcttccctcttgccttgctattgcttctctagtttcttaaagatgaaaactttcattattgatttgagacctttcttcttttctctcagtcctgcttcggtatgaagctcacaaattttgaaatgttgcattgcacttcatttattcaaaatatattttaatttctcttgagacttctttaacccatggattatttacaagggtattgtttaatttccaagtatttggggatttttcagataagtttctatctgagtttccagtttaattctattatgatctaagaacataattttagaattccaattcttttaaattagttacagttttttcagggcccagaatatgatctatcttagtgaatggatgtgcacttgaggagaaggtacagtctgttgttgtcagatagagtgttttgtaaatgtcaattagatcaagttgagtgataatggtgttcagatcatctatatacttactgattttctgcctgcttgttttatcagttattgtgagaatggtgttgaagtctccaaatgtcattgtggctttatctatttcttcttcagatctattagtctttccttcatgtactttgatgttttattattaagtgcatacatgtttaggattgttaatgtcttgataaactggctcttgtatcattatgtgataagcccttttacttcctgataatttccttgttcttaagtttattttgtctaatattaatatagccactccagctttcaattgcttagtgtaattctgggtgatttttcgattgattccttcacattttgaatattacgttataaaaatctgactcctgttaaaatcctttgaagaaagttagagttcttatttacttttttcagcaggttaccaactggttagcttcagactccaaattctgttttcctttgccagtgactacagtcagttcctattttttcataaagtagcataacaaagctataaactttgctttactactctgtgtctgcacaatggctaatttgggatttggctgtagaattatgtaatagttctgatctcaaaatcttcgctgtgctgcttgcataggctatgcatgtgaggcaaccataaatgtgcagcttggagttgagtcaggacttgcgttcgttcattcataaaattagcttctagctttcttctctctgaaatgtcccccatctttccagctcctttggacttccttccctggatttttggctagaatgatatgatttcttttgaaatgtttgcctcccagcctgcctccaaatttgcataactggagttgttcttaggcaatgaggtaagaggaattcgagaaaaaaaaataacaaggacttcccccacattctttggactatagaggccccatttcctgatttctctggacagaaagatttttccccccgttggggctttagattccaatttggccacagctgccgcagtgcagctccttggctctgatcatcctcggagcagggcccagcagaaagaagacaaaacaaaacaaaaatgggggttttccctatactctctggcttgcaaggcattttgttctagatactctagccggaaaaaatttactttctctaggattttgcttccctagttcacagtttcacactgatactgcccttgggttaaagatgggaagtaaaggagggggaaaaaaaatgggaaactcaccctgtaacattcattcttaaagttttgtctcccctcctgatcagccttattgttagcttttcagagtcctcaggtagttactttatataatttttgcagatactgagttgtaatcagtgggagagataagctgtaatgggcttattccatattggcctgcatgggaagtccccctccaccacagttttctttcttccaatgcctttggcaactttccttttcccccccagtcagaagcctagcaaaaacttgatagaaatcattcataaccaaatattggcatgtaaaatctttcctttcttaaaatgatccatagtagcagagtaacattttccaaaggcaagactctaatgagcaactataggctgccaagccattaatcaaaattataccaacaccaaagcagttagccttgtgtgtgtatggtattgtttgtgtaatttcattatacttctggcaatgtatacttgttagttatgtttctattttggttttaaaaaatctttcatattagcaacatgcaaaatgaaatgtgaaatccttccagaaaaacatcagcagacggggtctacttctctagcatttaaaataatttggtttctaagaagccatacatttcttagattctttgtttatttttggtgaaattcagaagtcagtaaaatttaactcatatatttcaataacatacagatagcataccagcctgtttgattatatgcgtgcagtgtaccaactcatctttgtctttggccttaacttatgccttgtttttgactacatcttcagcagtacaagcccttatgcatgtttttcctcttatatataaaccaaagattccatagcacacaaataatatagaagaatcaaatggacccttctagttttataagctgctgcttcagagacaagccctgtttctacattgcattttccatacttctcatattatcatcagctccttctatatcccaaaagaatactaactactgatcgataacccggacatgtctggccatggcctacatgtgccctgggtagttcatttatttgtcttggtggatttgctagagtggaatttaatcaatagctaattcattaattctggtcctcgagaatgtagagactgacctggatgaagataacgggctgggtctggctttgatagaaatatgacaaacactgcagctgacagcttcactaggtactgtgctatgaagtttagttatttattccccataaatggagacactaagaaaataacacaaacaagaaagatgttttattacattactgttagtattccaaaatgcatcatttccaggcatgaggctcaagggaaagtagagaaagaactcagatcatgtcttttaatgtctttaattggaaccatggcagttttttcacatccaaatcagtttggggatgtgttattgataaggagtgtgaggtataaagtcttcgtagcactcacaaataattgttttaagatttgcttctagatgctgaatgagatcaatgatattcttatacacaaactttgcagaaatctttctgataacagcataggttagatgtctctaaatgaatgctaaaccactatcgttattaatgaatatctatatatttttttcttttttgttgttgttgttgagacaggatctcgttctgtcacccaagctggagtgcagctcactgcagccttgaccttccaggctcaagcaatacttcctcagcctcctgagtagctgggacaataggcatatgccaccacacccagctaatacatttttaaaattattttgtagagttggggtctcactgtgtcgcccaggctggtctttcgaactcctgggctcaagtcatcctcccgccttggcctcctaaattgctggtattacagatgtgacccacacagcacccggcatccccctatatttttaaattacttaatgtggggttaagtatggttcaagaggtcagagcttgtggagaaagaggattctccttttttcctcaccaaattttatgagacatgctatgatatactttttatgctatgacattagatatcagggaatctcttctatccttgattttttctgcctaacttttctcagtgaatgatagcttcaactgaagtaatgattttacagttttgtaaaattaaaagaaaaaattaatattttacatttaatttaattatttaacattacaagaaaaaattaaggccacatttctgtttgtttgctttaatagggagagtgttgggctgaaggatacagaatgtcaaatcacttgttttcacctgtataccaaacttgcttaccaatatgggcaattgtagactatttttaatatggactaaaactgtctgcttaaacctttaaaggatatgggtagaaccttgaaagagagaatttggactacactaagtgcaattcgtacagatccaatcaatagccttatggtcaccatggcttttaggaaatattactcatttgatggccatgagttctgattatcacattctgtttaaggagaccttaatagaatagtgtcagaatatagaatgtaaacagaaagacagaatatatagaaaagagaatattgggcttattattatggctctgctatcactattttcatttccttacctccctcttcttcccaaactcctcctaacttctttacctcttgtagctcccatagaaacagctcggtcgctgaagtagcctttgagtgcctttcagcaaaatccagttcttcctcctaattcactttagccctcaactgccactttgtccctggttctctaaacattcattgttttgttttgtttttattggttccattaaaaacccacttatgcattctgggtgtcctcaggaaaaagactccctaccttgctcaggtagttcagtcttgcaattttaagccatactgatgtctcaaagatctctggccctgttttcttcctaaactctaatcccacatacccacttgcctattgattttatgtcatgatattcacccatcacttccataaccatgagattcacaagttaattcttatctaactcatcatcttttccaacactcacttctgcaaatgtaccaccatcctgcatattatcgaggacatatatctttgaagtatttttaatcccctaagtttattaaacactgattttagtacattttctgttggagcatcttctcatatatgttactcttctccatttccaccactaccaccctggttcatgttttcatcgtttaagtttatataaccattttatggagctgtcttaatccaattagatacaaagagaaaaaaaaatcctttacttttcacctgctacttactgccttaaacacactgttttggctatccttccctcaattctcaaataccccacaggaacatcttatgggtttccaattatttttagttatgagtctcactttgataattaagattcatgatcaagtattaaaaagtccattccatcaccatcaaaatattagcctcgcatctagttcaaagattctatcatttctaaagctcaggcctaattgtagcttgctcttttcttccctcttactctttctttcctattccattttatccaaatatgttccctttcaattttattacttcactgccatcactgtttgacaatcacagctctccattggcaagtgatgctttcttgggcaattgtatgtttttcttgagaggtcctcatgagaatctttgaatagccaaattccctcacacgagtgttgccctttatagctgatcacttgtggtgccaaaagagcagaacattccaaagactcttcctgctggagtctcctcatgccagaaggccactgtcctgggccatgtaccttcaagttagctcaaacctagccatcttgcaaggcatccacttggctcttgagaaactcatccatctatgccatgctatagatcaatattgtggtattctaggcttaacctttcattgcagaactgctctggccaatctctggccactagaattctctaactgagaagtaagctttatttcctatgctcatacagactgccaaatttaagagttccctgtcaagctgtcccaagatctcttcaccacattttcctccaaggacaaaaggagggaaatgtgtgttcctttttattaaaagaacatgggttttgcattttgactttttacctactacaatttataataaacatctcagtaggataattaaatattcagtgacttgacttgaaagcaaagaattaaatttgtcatattacatttatttcatctttgttaaaagtgttctgatcatttttgataaccatgatctggaataatattgaagaacttgagtgttacataaatgattgacaaaaatgaccaaatcgattagaaaaaaagcctgtgtaaacataaccagataatctagagctatttaatccataacaatttaggttaatatcttagagtgtatgaagatttcttttctctggtcaaacaaaaatgttttgaaaaaattggggaaaaatattagaatgaaatgttaaagaatagtaatgtgaacctgtcttcataaaaatttgatctgacttgtatcattttgatattcacctgtgtaaaggtaagtgatatcaaattattttccctacactcctttgtatcttcaatggtattttgtacttcaagggacaactggaagtgatgagatctggggagggtgaaatgcatctgtaatcctaactagttgggaggctgagtcagaattgcttgaggccaggatttgagtccagcctgagcaacatagcaagatcccatctctaaaaataaataaagaagaaagtgatgacaactgtgggggtggcacaatagtatgtagtagtaacagtaataaaatagtaattctgctgacaatatgacataattaaaaagaaataactacaactagaatgtctgaacacttgatgaattcatgtaccaaaatatgtgtaaagaacttccagttccaaaatgatgacatagaagcaagctggcttcactcctctccacagaaaacagaaacaaatgtacagaactgagattatcacagcaatatcccagaactcaaatatgaggacaagacagttcccaaagtcacagagaagtgaaaatctccgagcagatggtaagaaaattggactttcatatccacaatgcccatctccccaatatattcagcaccacgcttgtggaaaatattttcctgacccttgatttctgcactggaaaagtgcgattgaagtggacagtttcccgaccgtcttaggttacctggcaggagacctttacctgcctcaacccacaggaagcatcaggagtgcccgaagggctctatctctgtgaggacatccagagacaatgtggggagatgggactaccatcaccagccctggaaattctgctctgtaactcagtaaaaggagatgccaaatcagagtggctgttcagcagcaccacactgtagtagttttgctccacaggtttcctgggcaccaatcctcagccagcctcctcacactaccaggatatcccctttggaacctcccctatttgggaaaggtggtattctgatagtttactggagacaaggcaaacctggacctgaggcaccatctagtgccaaaaaggaggcagtgacccagtgaattaaaaaaaatgaaagaaaatgaacagaaaaattacaaagaatctctatgcaaacatacctaagaaaaaccaaagcaagccagagaagactgcaataaataactaatccttcaatgcaaagacatagacatatatccataagaaatggagagaagagtaatatatgagaggatgctccaaaagaaaatatactaaagttgctgtttaataaattcagggaattaaaaataattcaaagatacatatccttgataatatgcaggacggtggtgtgtttgcagacatacaacttctttaaacagggaagtaggatcttctcaagctgacaaaagcaaggaaacagtgagtgaccctaacaagatggtgataggtgaactctatgaccaagaattcaaacagttttaaggaaactcatgatcaccaagatagtacataagataaattcagacatttctcaacagatttaacaaagagattaaaatggttcaagaaattaaaaaagaaatcttggatctgagaaatacatctgctgaagtgaaaaattcattagaggctctcaatagcaaactagatcagaggaaagcatcaacaaacttgagacaggctatttgaaaatacagagaggtggggataaaagaatgaaaacaagtgaagatcacctacaaggtatatagaaaactacctgaaaagacaaaatctaggaattattggtgttcaagaggaaggtaaacaagagcaagaggtagaaagctttttaaaagaaagattaacagaaaactttgtaaaatgtaagaaacagagaaatatccagatatagaaaggtcagagaagaccagatttgattaaaataagattattccaaggcatataacaatcaaattcttaaaggtcagtgacaaagagaggatcctaaaagcagcaagagaaaagaagcaaataacatatttaaaagcttcagtttgtttggcaacagtctactcaacagaaaccatacaagctaggaggaagtgggatgacattttcaaagtgctgaaataaaaaaacaaatgccatataaaagtactgcatacaataaagctatccttcaaatatgaaagagaaatgaagtccttcccagataaaaagctgaagtaatttaccactatgagacccatcttataagaaatactaaagagagttcttcaaactgcaagacataaaaaactaatgcacagaaagaaaacatttgaaagtaaacccactgataaattaagtacacagacaaacccagaatactctaatactgtaattgcagcatgcaatccactcatcacttcagtatgaagcccaaaagacaaatttatcaaaaacaatagtaggtacagcaacgtgttaagagatagacaacataaaaatatacaaattgagacgacataaagtcaaaatatggagaaatacagttaaattttagagttttttcattgtttctttgtttttggcaaccaagtacaataaccatatgatcatttcaatagatgctgaaaaagcatttgataaaattcaatatggctttattataaagtccctcaagaaactggatatagaaggtgcatacatcaaaataaaagccatgtatgacaaacctatggctaacattgtactgaactgggaaaaaatgaaagtctttcctggaagaactggaacaagacaaggatacccacttacacttttattcaacacaatactggaaatcctggtgaggcaatttgtcaagagaagaaataaagggcatccaaatcggaaagggataagtcaaattagccttgttaacagatgacatgctcttataattagaaaacctaaagactccaccaaaaaacctgttagaactgatgaacaaatttagtaaagttgcagaatacaaactcaatgtacagaaatcaatagcagttatatacaccaacagcaagcaatctgaaaagaaatcaagaaagtggtcccattaacaatagctacaaagaatataaaatacctaggaatcaatttaactaaaggagtaaaatatctatacaagtaaaactataaaatgctgatgaaagaaattgagtaagatacaaataaatggaaagatattccatgctcttggattagaagaattaatattattaaaatgacaattttacccaaagtaatttacagattcaatgtaatacatatcaaaagaccaattacattcttcacagaaatagaaaagtatttctaaaatttatatggaaccacaaaacacccagaatagctgaagcaatctgagtaaaaaaaagacaaagctggaggcattacactaccttacttcaaaatatagcacaaacctaaagaaaccaaatcaacatggtattggcataaaaacaaacacataaaccaatggaatagaatagagaacccagatataaatccatgcatttacagacaactcatttttaacaaaggaaccaagaacttgcaatgaggaaacagtctttttaataaatggcactgggaaaactagatatccatatgcagaagaatgatagaagagacagaagagatagacccctatctcttaccgcattcaagaatcaactcaaaatggattaaatacttaagtctgagacctgaaactgtaaaaccaatagaagaaagcattggggagatgctcccagacatgatctaggcaaaggcatttgtgtaagatctcaaaaacactggcaagagaagcaaaaacagaaaaatgggattacatcaggctaaaaagcttctgcacaacaaaggaaacaatcaacaaagtgaatagacatgccatagaatgggagaaaatacttgcaaactgtctatctgacaatgaattaataactgggatatataaatagcttaaacaactcaaaagcaaaaaacaaaaacaaaacatctgattaaaaatgggaaaatgatctgaataggcatttatattgcctattgcctattcagaagacatacaaatggccaacaggtatatgaaaaaatgttcatcatcactaaagagatgagaattgcaactcaaaaccataatgaaatattatgtcacccagataaaatggctttgataaaataaaaaagcaggaaataatggatgctggtgaagatgtggagaaaggggaactctatttacactgttggtgggaatgtaaatttgtacagccactatagaatattgtatgggggttcctcatgaaactaaaaattgaactactgtataatgtagcaattcactactgggtgtatatccaaaagaaaggaaaacaatatattgaaaagacacctgtactcccatgtttattgcagtgctgttcacagtagccaaaatatgaaatcaacctaagtgcccatcatgaatgaatggataaagaaaatgtggtacatatacacaatggactcttattcagccataaaaaagacttaactcctattatttacagcaacatggatggaactggaggtcattatgttaagtaaaataagtcaggcatagaaagacaaacattgcatgttctctttcatatgtgggagataaaaaagtgaacctcatgaaggtagagagtagattggtgattaccagaggcctgagagggtcatggggagagggagaggaagaatagattgattaatggatataaatttacagtttcaatgaagagataagacctagtatttgatagatcagtaaggtgatttatagtttacaatatcttttacatatttcacaataggtagaagggaataatttaaatgttgttagcataaagaaaagacaactatttaaggtgatggatatgccagttacattgatttgctctttacaaattatatgaatgtattaaattctcacatggaccctgaaatatgtacatctattatgtattgattaaaatatatttttttaaactccaggcttccccaagattgtaatccacctgtaatttaactgactgctagtaaagcctgttactttcagaggaaaacaattcaacctagagactttgcaaagtataatccacaatgttgtgtgtatgtgggctgtgtgtgtgtgtgaaggaatgagaaaatgtaacccaaacatttgagagagaaaaaaatgtgtgtagacatggtgacttttatcagaagttgtattaaggtatcttaaatttcagttcctattactttaaaatctaaaaaaaactataacagttatttcatgaacaaatctaccaaaaaaaattcattcaaatatttgcaatctgtttatgtttatgcatgagtgcccaaaagtatcttcagctctttttctccaatatttaacatttattcctgggattgaagaatgttccttctattttactcttaaacatcaaagcaatgaaactattaatcccgctaataatgatgcatatttctcaaagatgcctttcattttcagatcagcaaccaaaggagtttcaattgtctctccagttggctctaatgagagatgtacagatgttaaacccaatactcttcttaatcattttccttcgtgtacttgattaaatcctcaaaagcaaactgttcatgttcttgccgaaaatataggcggtctcacttaacagttatgttgcacaagaaagggaagttataatggcatggaacgtgctctacgtggtattttctagactttactagttcacgagcttttgtggataagtcaaactcttgaatgtcacttaaatgtaatcttttctgtagttgattatgcagagaatacaaaaggtatctgcagaatgtggaattaattttgaaagtttgataaaaacttcagaataatagctgtggctgtacaagtcatctatgaaactgttctctcataggtgacattaatttcctatctacagagttttattactgaatgtgttatgtttgtacccccacaaaactgaaataatagttttctttttttagcagtctatgaaaatgttgaggtttatcttgactgccgctttttaacataaatatttgggcttcattgaattcctaatatgtgatgtcacttggaattctgatagggtccagtaatttggcctgcaaagacatattttaccttaaaatgaaagggatagttgaaatgttattttacacgatagcaaaaaagcatccaacataagttgtgagatttttattgcttaacttttgaaatagaaggacaaggttcttatgtgcttgctttattccaaagtatatatgggaatgctaatgctttatatgtaaaatgtacgctacacatatttgtgattagttaatttttatggctagaaattctagaatcataaaaaagaactaatcttgaatgtcagagcttcacctatttttttaaaaacaatgagaacaaaaaaatcattataatttttatatttaccttgtgtttcacaaaaaggaggttttctttgctgtgctacactgcaagaatatgtcatgttcaaatctctggggctttattaaaaactttaactactgtcttcttatagagattattaagcaaatactaaagatagcatagatgtgtggtctaggcagtatttttctggcaagtagacctaagtgcagaatttaagttctgtaacattaacctgagactaaatcattttattcagggttgtctcctctgtgaacagctttatgttatgacctcatttgctacagcaaatgaaatattaatagatcattgaaaatgcagtaaagttttgatcagatgttataccttcattgtataccaaaccctgcctctcataaaaactttctacttgggtttaaattgaaattatcactcaattttttaaaatcaaacattttctttaagaacatgacaatgtaaacatatttcttacgggaatctttaagttctatatttttcaccaaaaatcatttcagaccatgctagttaaagagttattgaaaaaaaaaagaatctatttagatgagtcaaaaaattaagcaaagtatgttttaaataagttagtgactataaaatttctcaatttgggcatttattttgactgcaagtaacaaaacacctgacaaaagagacttaagtaaatagctctagatatatagttgactcttgaacaatgcaagggttaggactgctgatccccacccagtcgaaaatctgcatataacttttgactgtcccaaaatttaactactaatagcctactgttgaccagaagccttaatgataacataaaaaactgattaaaacatagtttgcatatatatttatactatattcttaccataagtaagctaaagaaaagaaaatctcattaagaaaatcataaggaagagaaaatatatttactattcattaagtggaagtggatcatcataaaagtattcatcctcattatcattatattgagtaagctaagtaggagaagaaagaggaaaggttggccttgctgtctcataagtggcagaggtggaagaaaatctacatgtaagtggatctgcacagttcaaatttattttgttcaagagtccgctgtggatagttgttggcattggtgaaccaatgccaaatataatggcggcatctttgtgattgttttggccttttcaaataactgaaagatgattgctgaagttgtagacatcatgtttagcggaaagaaagagaaaaggagaaggtggcagctctttcaagaaagctaaaatttcctaggaacctccataggagtcccatcatggtgttcccgtggcatctctgagcagttatgtttcatatcacaactcctaggtaaagtaaggcaaaggagaagcaggttagaagtaggcattaagttgccacatgttctaattgtcaccttgtttaccaagtcatgtatgtcttatctttgcttaccaaacaaaatgctctgattttcttgattagccatagtgacacttgcttcttgtctttgaaactgaaagtaataaaccacctcacgccatgtgttattcttccaaaagctaacataattttgattgatttgaaaatatatgatttcatatataaacatatataattatatatatatattagtatctattgctgccactttttacttaagactgatagcatcaatgttaaatagtgtcttttcagaagtattgattattctctctgttgcagatctcttcaaattgattgggtgtctccacggaagccaaatggcatcattcttggatatgatctcctatggaaaacatggtatccatgcgctaaaactcaaaagttagtgcaggatcagagtgatgagctctgcaaggcagtgaggtgtcaaaaacctgaatctatctgtggacacatttgctattcttctgaagctaaggtaagtcttttctaactaatcagtgaaccatgtttttctcactcaagactccaagtgaaattattagcttctcacaccatgatgtattatgatcaatatttccactactctatgaagaagactccacggaaaagaaaggatgcttacaaaaatcactatcaccctcatgagcactttagccttcccattttttattatcttcacaagaaatataaacttattagaatagggtacatcccaaattttatttgattgagtgacttaaaattttctttacaacagatcttttcagctacaaataggtgtttgtttatatggcactgatgagtaactgtgaggaggacattttatgatttgtcagaaatattttagcattatagtcatttgtagattaatgttcatattagatgcggtttagaaatcagatcaataatacagccagacagaggagtttgtaaatgacttttattgacaaacaacacaaaatccttagtttgaaggtagaattttatataatgaaataatgttcctatttggcaacaacagcatcacacattcaatggctaaagctactactaaatttataagatttactgcaaaagaacaccataattaagaaagtgagttactgaagcaatatggatcaaaatacaaattattatggctgacacaaatttagcaggagttatcatctaagaaatgcataaagccagcagttactaactgtgcattttttgatacttagactctaaaattatcattatgcctacatttgacatcattttatgccattaagtatgcacatatttaaatacacacatctgatgaacatatttgtataaaattaaatttgggatttctgagaagaaaaatactaaaataaatttgcccattaaacatatcctccacttaagaaaaacttgggaaaatgttggcaaaatacggaattcacttctcaatttttttctttgcttctattattttaatatttattatctgttacgaagtggacaaagagagaatagttgtataggcatacgaataaatgatttaaagtttgtggagtgcagaaaacaatgtgttccatcaaagtaaaaactgattctggccagaaactgtcatagtagtttaggtgtgtataatggatttgataagtttcaaccctataactttagtggcaaaatcaaagctaagtagagtaaaactagtaaagataatgtttccatttaagtttattctaaaagatcaaaaggtggatgttcttaaaatgttcatattaaattagaatatacctgagatagggtgaagaaaaagtaatgggatgaagaaaaatattaataaagtattaacagaataatatttacctatgtttaggctaaattatttataaaattactcctacctttctttatgctgtgatttcagaaaccgctttttgtaacttttaaaaatttactgaagctttgtaccaaataagtgactggttggtgtaacattcctaaattcagtgaatgacaaagaaccggttagtttaattttaaatcaatttaaaaatgatttagacaaatctactctacaaaaaaaaaaaaatcatacgggtcaccttttatagaaaataaatgtaaattgatgaatagggaagcaaaagttaggctttagaaaacaggcgtgtgcaaatctcaccacatagtcttgaaaagaaacatcacatttggttattcttataatgcaaatgtcataccttattacactaaaacgagacacactatttaatgatgccttaaacaaagtcttatttttattgttgagcttaaagaggcaacacaggtattgcggtaaaagagaataaaggatgtcagttaaatttcaaaaaaaaaattgtaaagttcagtttgggactaggtactaatacacatttcctagcatgaaagattggagagaagtagaaaagagacttgtattgcgggtttaaaagctttttggctaaatcactgtaaacatcaatgtttcccaaaatacttaaacaagctttaccataagattacagccatggttcacaaatcccagtgaacgtaagacctgggggaattgttaaaacctaggatttcatagctctagtcccagagattctgattcagtaggtttagatttggctgtgaaaatttgcatttctaaacatgttcccaggtgtcttagttcgttttcacagtgctataaagaattacctgagactgggtaatttatgaagaaaagaggtttgactcacagttctgcagacttaacaggaagcatgactgggaggcctcaggaaacttacaatcatggcggaaggtgaaggggaagcaaggaccttcttcatgtgatggcaggagggagagagagcgaaggggagagctgccacactcttttaaaccatcaaatctcgtgagaactcactcgcctttagacctacaataaaagtctctttcctacttctctccaatctttcatgctagaaaatatatattcatacctagccccaaatgaaatttacaattttttaaatttaattaacttcttctgttgtctttcactgcaatacctgtgttgcctctttaatcccaacaataagactttgtttaaggcattattaaaattttatataataaaaaatgtatatatttaaatatatctatttttattataaaattttatataataaaagatctatatcttatgtatatatacatatgtgtatgtgtaagatataagatatacatcttatatcttttattatataaaattaaaattttatataataaaataaaagatataaaattaaaattttatataattaaatacatattatattatatagtattataatagagcacaaagcatggttgaagacttcaaaaaagctgcattctatcaaataacatttataaaattcgaatgatcctggaaaatacatttttaaaccaacgaaatatgagtaatatggtctcagatcttctatgccttacaagaaaataattatattacatgagatacagtggtataacactcttaactaaactgatatttctttaaaactgttttcaaactttcaggtttgttgtaacggagtgctctataaccccaagcctggacatcgctgttgtgaagaaaagtatatcccgtttgttctgaattctactggagtttgttgtggtggccgaatacaggaggcacaaccaaatcatcagtgctgctctgggtattacgctagaattctaccaggtgagggttatttccaggtgtactcaaaaactatgggaacctgaaaacataaacacgtggttcatgtcagtgaactatttcaaacacctccctctcaacaaaaattgaaccataaacacatagccaatggcctgctctaaatattgtttcttccttctgctttgttaaaatataagcaaggctaaatattagaaaacgagagaacagaaggaatttacaatatctactacagaaagaaataaatctggagatctggctaactccttttatcttgtggctttttttattaacatgactatatattttcactattaaatatgtgaattgctgactgttccaccccatgaagctgttccccacttcctccatttctaatctgaactacacatgcattgttcttggatagatcgcaactgcaaatttcatttgtctgagaattctaggccactggcaatattctctcatcataagtcaggcaagggaaggaagaatgctgcaaagggtagcaaactggattttttccttcatccctttttagtattagccaacttagctagccattttgctccaaatttcaactacataaaacaatgcctagtgaatataattgggaatgatgctaataataactgccatttttaaagtaccaagtctctcgcaggctctgtattgaagactttacatgggataccttatagaatcttcacaactccaggaaatttgtattatacaaggcagtttacaagtaaggaaactgttttagagaggatcaataacatatccagattcacagatgtgcatagaagtgaaagaactaaaatgtgaatataagtatgtctctcctaaatctatgctcttttgtgtactttactgcctctttaaccaaaaagcatcaacctcttttgacaatttttttaaaaggactatttaagacttctaaacttcttcattactaccactgtcagttacaatttatcctgcaaaagtaattgagaatacaaaagtaattgagaatacaaacttttttctactacttaagtttgatactgatatcttctttaaagagcaggaaatggatataggagaaagacaagaaagccaagttttttggaggccataggaaagctgaatactttgagatatctagtttagggtgaaatttatgcccaacgtctggttcctgtaaattatgttcagtataactatatccatccaaggcatgtgaaatgagacactgtctaacccagtgtctgttttgcaaaatactggagcaaatatagaaggcgtgcaatcacctgatgggttcatcttgcccattgcacagatagagccaatttaccaaaacagtggtattgcaacagagaaagagcttaataaatgcagagccagctaagcagaacaggaggttttactcaaaacagtctcccagaaaattcaaaacctagggtctgtctgggcacggtggctcatgcctgtaatcccagcactttgggaggctgaggcgggtggatcacctgaagtcgggagatcaagaccagcctggccaacatggctaaaccccatctcttgtaaaaaatacaaaaaattaactgggcgtgtggcaggctcctgtaatcccagcttctcgggaggctgaagcaggagaattgcttgaatctgggaggcagaggttgcggtgagccgagatggtgccactgcactccaacctgggcaacagagtaagactctgtctcaaaaaaaaaaaaaaaaaaaaaccctaggggtttttttggttggttttttgtttgtttttgttttttgtttgtttttttatttgtttgtttgttttgagatggagttttgctcttgttgcccaggctggagtgcaatggcgtgatctccggctcactgcaacctccacctcccaggttcaagcgattctcctgcctcagcctcccaagtagctggaattacaggcatgtgccaccacacccggctaattttgtattttcagtagagacaggctttctccatgttggtcagggtggtctcgaactcccaacctcaaatgtctgcccaccttggcctcccaaagtgctgggattacaggtgtgagacaccacacctggcccagcctagggttttttttaggatagtgcagtaggcatagggctagggaatgaggaatgcttattggttggggataaaattatagggagtcagagctgtcttcttgtccttagtcagttcctggatggggactataggatcagatgagccagtttactggtctgggtgatactagctggtccctcagaataaagagtgtgaaaaatagctggtccctcagaataaagagtgtgaaaaatacgttgaacaccaatcttaggttttacaatagtgatgttatctatggaagcagttgggaaggttaggaatcatgtggcctctggtgccatgaacacctaagccgtagttccttgtggctaatttgttaattttataaaggtgctctgccccccaagcaaggagcaagtttgtttcaggaaaggactatcatcagtgtttcgaagttaaactaaacacctctcatagttatcttggcctatgcccaggaatggacagggtagcttgtaggctagaagcaagatggaattggttaggtcacatttctttcactgtcataattttccagtgtcaggattttcttactgtcataatttttgcaaaggtggtttcaggtgtcctgattaaatactgctcaagttttctcaaggcagagaaccttcactcattatttttccttataattaatagaaaaaaaaagtttgtatagcagtgctgttatttcttattctctatcaaaaatatttcaaaattgaataagttctagtaaaccagattttccacttaagaaaaagtaaaaatatatatggaaataaggattttgtagaaaactgttaaacttcttcatactacagctcacgatgtcaacaatggatcaaatactgttaaatgctttactttctcgaagtaacttaaatttggggagttttcatgtatgattcatatctgcccttgattacaaatcattgctataaaattataattacagtgatcagatggacgttttgtgttgttcaattcctaccattcttcacaccagtagaccaagttgatcatggaactaagtaatagtgttttcatttccacatcacattaaaatttttatgttatgatttgcaacaaactattcaaactctacaaaatatcctctgtcccttaaaactaatgaaaaattcttagttacatcttcactgctgctaactcaggagactggcctgtgactttctcaatgctaacataagtagtcagattttgaaccgacagcacaatctacttttgttaggtttcaaaataaaatttaacatttttcttaaaaatgaaataactcatggaagctcagaagttgtcattgatattatataagcctttaataattaatttttagaccaaggatttaaaaaatatgtattgtctgtatgtataaatacatgtttctgcacacctaaagcattttaatatctaccaaaccattgagcatgccccaaattttgattcttttttaaatagttcatttttcatagcattagaatgcataccctggtgtcaagaaaaaaggaaaaaagcaatctcatgaaataatcaaagagtgttttgctccaatcattaatcccactgtacctaaatgaagagattattttgtgacctctgtcctcagccccgtggtctttgttagctagtttaacactggttacactgagggggaaaaaagcgcaatggtcccaaatcctgttgcatctaaatgtgatttaaatctggtcactagtctgccagttcaaggccaagatgggtataggcattttgatatttatggattagcctgaaatattggtaaatacgtactttattttttttctcatgactttcttccataacaccccataacaaacagcagaagaggaaagaatgctcatttctctcccttttttaataaatatgctaataaccccaagtaaatgttaatgtgggtcattctttgataagaataacaattaactgttagactgcatggtagtttttagagagaaaacattttcaagcctggcctgaaatagattcattttgagaggttaatgagaaggtgactgatccttgtatcttatgtctaatagcccctttttgaggaaaaaaaaatagttttattttttattgatataatccacatctttttttttttgaagacttttcttctgtcagtaactaaataagattctgagggattcagaaagacatagctaaaatatctaaaccaattaacatttattatgctcaaaagaggctttaaaaaaaagtattggctttcgccatgtagatgtgtatactatgtttcctctaagctcaccattgtcctgagtggtgtttaattaactgttgttgccctgtaccatgggatacattatcttaaagtttaccatagagggacattatgttctttgactgtgaagacaaaaaatatggcaactacatttcagacgaaatagaattattttacccaggggaagataacaaatacagtaactttactgtttacaataagctcgttgctccttcattggtctctggtagcatcatcatggaaacttttactaagttccctttttcttagagataccatattataggatcctttcaaagataattgactaagccaactgtctcctgaattctagaaattcatattttgagaaaatcctgagtatgtcttgatccggtcctggatatttaccctagagaaaagcaaatttatgtttacacaaaaacctgtacatgagggtttacagcagctgtaatcattactgccaaaacctggaaacaattcaaatgtccctaagtgagtaaatggacaaatgtggaacaaaggaatactatgtagcaataaaaaagaacaaagtattgataagtgccaagaagatatcaagcccagtgaaagaagccagtctcaaaaagctaccaactgtgagactgcatttacatgacatactatacaagacaaaccatagttttggagaaaaaagttgacaattgccaagggtaatggatgggaagggaatgtgactatacagggatagcgtgagggtgttctgtgggggtgatgaaactcttttgtatcctgatggtgtttcttcattaaaattcatggaagtgtgcacccaaaaaaactaatggtcctgaataatatttttaaatgaaatatttttaaaacactatttccattttacacataggaaaaatgggacatagaaacatgaccaagacactcagctagtcaaaataggaattttcatggttaaattttaggttgagctcctagagatggtgtgttttataataatgtgatgactgtgtatgagtgacttaatatatttttctcatatgttagtagaacagtaagatagcaaatatatttccattaaaattacaatgaacatccctatctttaaaagaaagcaaaaatgtcttagtcagtgatgactatttcaagtaatattttacatgatcacattcttatgaaagcataagttttgtgtagtgtttccgtggtttgatgctgaataattagtgaataagatattggttctggagtcaaactgcctggctccatatcccatttctttcacctcttagttgtttgaccttcattaagtaactttaggaatattagcagggtattaatgtttctgatgtccattgggctgctgagttagaatactcaaagctaaccctatcttttatatctaaatagaaaaaaaatgtttagtaattgaggagcatatgagtaaagagggctaacaggcctcctttaaatgacaaagtttctaatgaatctttccagagcaaggactcaggggtgtccactttcatcagatcatgtaaagggatagccagttcccaaaagctaagattcaaacatctaatgacctttgagatcctatgaaacaaaggatccttgttgatcctatgaggccaagcaattctctaagttgacttttagcaactagccagggaaagtcatgaagagcttccaaactttgaagagaaaaagactttccattttgcaaaatgtcacagcctagaatttaggtcctagaaaaagcattttgttctgacaaaattgacatttagagactttatgtcgattgtatgctaccactattgacaaatagagggaatcaatttttcaagtctatctggagaacgtgacagatgatcattcacatattgcacaacagttgaatcttataggggaaattaaatatcgctcagtttgtttcctattgctgctataaatcatgaccagacacttcgtggcttaaaaccacacaaacttactttatacatccaaatatcaaaagtttgaaatgggtctcattgaactaaaactaagaagttaacaagagctgcattcccttctggaggagagaatccattttcttgccttttccaccttgcagaggctgctcacattctttggcttgtggaccccttccattttccaggccagcaatgaccagttgagcctttctcacttcatattattaaacttaatcacatctgttgtcttcattcccctttgccatgtaacataacatagtcacaggttccagggattaggatgtggacatcttagggaggccatgttgtgcttaccatggtaaggtaatggttaagcagttgtgagaattaagaaagcattgtcgtaaactcttggggaataactgtcacaagtgaaacaaaaaaagatactgtgagcctgagtgcaagaatatatgaaaaaaatgctaagtatagatttgctataaattaagcagctgcctcagggagtggcagtaggatgatattagggttgggaactacagggaaatgggggagtgcaatcttgttaatgacacttaaatcttgtacaaagtggtacacaagtcttttatcattttgatagagtgaacagtgaactacaaggactggtacaggggataatggggtgttatgccaagcgaggtaactttctagaggtatgtagatacaatggaccaagttattaaatattgttctttttagtagattttgggacagtttcaagaaatgcatagccagattgatagacatctttaaggggttagcatcctgtatgaatcccacatctgagcagtttttgccccagaggatcttggagacacattcaaagtcagagatgttgataacaaaggcatcaggtaattagctggtgctaccaccaaattataggccaggcattcttctcctgggagttacagaaagagactttcaggtgcacatttaatgctggtatctcatttacaaagtggatctcttctcaacagatgcactgaagtggaattactaaacaaaaaatatgttgattcaagagaaagaaaagaaaaataaaggcagaatctgaaaattatttgatatgtgtaccgctgagacatttggttattcctagaaagggataatggaaaattagaagggtttttgatagataatatacctaccaccagtatcaatcttctatttttacaattgcatagaaatttctcactttctatgtcaagggcagttatggatagatgagagcagctactttcacagagaggtgctgttttgtcagtttgtccttttttttttttttttttgattgtgtctttctaagatacactaataaaggcaaagtaggtgttctcccagtgtcccttacaatattgaaagttgtttttgtgcagactagacatagaggtgccctcattcttggctttatctaattgcttaatcccaaaagctgttaatgtggtctgaattttttttctttttttctgagccaaagtatcttctaagtgcttagcaagctcttgtaatttagaaggaagggacaatctactgtcttatcttctgttttatgggaagttatgataccttcttcactgatctttagagtattctggaaggtggtagttaagtgatctctgaagccaggcatggatttattttttccttgtttacaggacttttttgtggtaaagtatacaccacataaaatttatcattttaaccattttttaagcacacaattcagtggcattgagtgcatttgcattgttgtacaatcattaccaccatccatctctagagctcttttatcttctcaagctcagactctgtttccattaagcactaactttccactccctgttatcttcaacccctggaaaccaccattctgtttttggtctctatgaatttgactactctaggtacctaatataattggaatcatacaatatttgtctttttgtgtctggcttatttcacttagtgcattttctttcttttttttttattatactttaagttttagggtacatgtgcacaacgtgcaggttagttacatatatatacatgtgccatgttggtatgttgcacccattaactcgtcatttaacattaggtatatctcctaatcctatccctcccccatctccccaccccacaacaggcccctgtgtgtaatgttccccttcctgtgtccatgtgttctcattgttcaattcccacctatgagtgacaacatacggtgtttggttctttgtccttgcgatagtttgccgagaatgacggtttccagcttcatccatgtccctacaaagaacatgaactcatcattttttatggctgcatagtattccatggtgtatatgtgccacattttcttaatcctgtctatcattgttggacatttgggttggttccaagtctttgctattgtgaatagtgccgcaataaacatacgtgtgcatgtgtctttatagcagcatgatttacaatcctttgagtatgtacccagtaatgggatggctgggtcaaatggtatttctagttcaagatccctgaggaatcgccacactgacttccacaatggttgaactagtttacagtcccactaacagtgtgaaagtgttcctatttctccacatcctctccagcacctgttgtttcctgactttttaatgatcgccattctaactggtgtgagatagtatctcattgtggttttgacttgcatttctctgatgcccagtgatgatgagcattttttcatgtatcttttgtctgcataaatgtcttcttttgagaagtgtctgttcatatccttcacccactttttgatggggttgtttgttttttcttgtaaatttgtttgagttcattgtagattctggatattagccctttgtcagatgagtagattgcaaaagttttctcccattctgtaggttgcctgttcactctgatggtagttttttttgctgtgcagaagctcttgagtttaattagatcccatttgtcaattttggcttttgttgccattgcttttggtgttttagacatgaagtccttgcccatgcctatgtcctgaatggtattgcctaggttttcttctagggtttttatggttttaggtctaacatttaagtctttgatccatcttgaattgatttttgtataaggtgtaaggaagggatccagtttcagctttctacatatggctagccagttttcccagcaccatttattaaatagggaatccttttcccatttcttgtttttgtcaggtttgtcaaagatcagatagttgtagatatgtggcattatttctgagggctctgttctgttcctttggtttatatctctgttttggtaccagtaccatgctgttttggttactgtagccttgtagtctagtttgaagtcaggtagcgtgatgcctccagcttttttcttttggcttaggattgacttggcagtgtgggctcttttttgggtccatatgaattttaaagtagttttttccaattctgtgaagaaagtcattggtagcttgatggggatggcattgaatctgtaaattaccttgggcggtatggccattttcgtgatattgattcttcctacccatgagcatggaatgttcttccatttgtttgtatcctcttttatttcattgagcagtgctttgtagttctccttgaagaggtccttcacatcccttgtaagttggattcctaggtattttattctctttgaagcaattgtgaatgggagttcactcatgatttggctctctacttgtctgttattggtgtataagaatgcttgtgatttttgcacattgatgttgtatcctgaggctttgctgaagttgcctatcagcttaaggagattttgggctgagatgatggggttttctagatatacaatcatgtcatctgcaaacagggacaatttgacttcctcttttcctaattgaataccttttatttccttctcctgcctggttgccctggccagaacttccaaccctatgttgaataggagtggtgagagagggcatccctgtcttgtgcccgttttcaaagggaatgcttccagtttttgcccattcagtatgatattggttgtgggtttgtcatagatagctcttattattttgagatacatcccatcaatacctaatttattgagagtttttagcatgaagcgttgttgaattttgtcaaaggccttttctgcatctattgacataatcatgtggtttttgtcgctggttctgtttatatgctggattatgtttattgatttgtgtatgttcccattcatgttgtcgtacgtgtcaggattttattcctttttaaggtcgaataatgtctcattgtatgtatataacacttttgtattcatttattcatcagcggacattggggttatttctgcctagtgactattatggttaaagctgccataaacattgatgtagaaatgtacaaatttctgttcaatctcctgttttcaattcttttgggtttatacccagaagtggaattgctggatcatatggtaattctatgtttaattttcatgttaagaactgccatactgttttgtggaacattttaacattttatattcccaacaacgcataagtgtgccaatttctccatattcttactgtttattattttatgttttttataactatcctaatgagtatcaagtggtatctcattgtggttttgatttgcatttccctacttattactaatattgagtatattttcatgtgtttattggctatttgtatgtcttctttggaaaaaagtgtctattaaagttatttgcccatttaaaaaataaggtctttgtttcatgtttttgagttatagaagttctttatacattctggatactacttccttatcagatatataattttaatatattttctcatgagttgccttttcactttgttgacagtgttctttgatgccaaaaagttattaatattaattatgatgaatccaattcatcttttttccttattgcttctgctttcagtgtcatagccaagaaatcattggcagacccaatgtcatgaaatttcccctttgctttcgtctaagaattgtaagttttagcttttacatctagatctttgatccattttgagttagttttggtatatggtataaagtaagggttcaatatcattctttggcatgtggatattcaacttttccaacattctttaaaaaaaaaaaaaggtcctttcctcattaaatggtcttggcacttttgttgaaaatcatttgcccatatatgcaagggttcatttttaggatctctgttctatcccattggtctatgtgtctgtctttgtaccagtaacacacttttgattactgtaactttgtagtaagttttgaaatcagaaagtgggagatctccaactttgttctttttcaatgttgttttgactatttgcagttttttgagattccatgtgaattttataatggcttcttctgcttctgcaaaaagcattgggattttgatagggattgaattgattctgtagatcacttgagcagtactggcaccttaacaacattaaggctcccagtccataaacatgggatgttcttccatttggttatcttctttaatttctttcaacaacattttgtagtatttcagtctttcgctttcttggtaagctcattcttaagtctttctttttttgatgttattgtaaatgaaattatcttattaattttattttcatgttgttcattcttagtgtatagaaacatacctagtttttctatgctgactttgtatcttgatactgtgctgaattgtttattagttgtaacaggttttttttttttttagaatctttatagttttctctatatgatatcatgttgtctgagaacacatagttttgcttcttccctttcaatttagatgccttttatttttttctcttgcctattgctctagccataatatccaatattatgtagaatacaagtggcaaagggtggcaaccttttcttgtttctgattttagaggaaaagttttccgtctttcactgttgagtatgacattaggtataggtttttctcatatactcttgattatgttgaagtagttttcatctattcctattttcttgagtggatttataatgaaagagattgaattttgtcaaatatttgttctacatcaactgagataatcatgtgtttcttttttttcccctttgttctattgatataatgtgttacattgattaaattttcatatattgacccatcctggtattccagggatatatcccgcttggtcatgttgcagaatcattttgatgtgcttttgaattcagtttgctagtattttgttgaagatttttgcatcaatattcatgagagctattgattttaacttttttcttgtggtttctttggtaagttgtatgtttctagtaatttgctcatttcatctagtgagatggatttttggccaataaatttggaaagaaaagatctcaaggatagctgctgagagttattgtcttattatttatactccttatatatctatgtttaattaaatattgtcccatatttttatatcattttggtaaacagtacatcttgcttttactaaacaaattttaggatatccagggctcaccaaaaggtgaactaattgagaagaagtccaggactataaatccctaaggcagtcctaaattcttcagtggatttgtgccatttcttaagaaagcttgacaagtcattaattggattatagaaatcttacctggaccatggttgaaggccataagacccatcagattggtcatcatactcacataccttataagatataatgaagagatgttgtccaggggaaaagatatgttcaagaaagaacggtagagaaaagggaagaaggtctgttgaaggtgtaggaagaagaggaggagcaggacaaaagagagaaggaagtcagggttccgaaggccacgagggaagacaaccacagtggggtcatgagatagagaagagaaatgaagcttggatttcagatccaccaagtttttattagttcttttgaaggtatccttaagggaagccatttacaaaatcttctgtcctttagagttgtctttataccaaacaaacaaacaagctaactcttggtatttagagtatttgagtcctttgattttaaggtaccaggcaaaagattatctaattctgttttttgttttttttgtttgtttgtttttgttttttagatatgcccaggctggagtgcagtgaaacaatcctggctcactgcgcactctgcctcccgcctcccgggttcaagcaattctcgtgcctcagcctctcgagtaggtgggactacaggcatgcaccaccaagcctggataatttttttatttttagtagagatggggtttcaccatgttggccaggctggtcttgaactcctggcctcaagttatccacccacctaggcctcccaaagtgttgggattacaggtgtaaagcaccacacctggtggattatcttattcttatcccaaatttcccagactgtcatgtgaagagaaatgtagtaaaattcagtgtgtgacatagcccagagaagtactagcacactgacttaaatacagtattttttacctcctctcatgtaattaaccttcccaatgggagtattttgtttggttgaacaaatatagtttggtcaaggaaattatagtcataagcaatataaatttatcaatagttggtttttgaatccactctacgttccaaaagaaaattacacagaacaaaaaagtattcctagatgtttttctataatgccacatagtccatgtcaccagacctgatggtgaggaaatagacaacatagacttacctgtaagttgccatgtgtgtatctgatctgacacacgtttatacacaaaaactttggagtcatttggaaattttgcaactccaatatgatattattctctttagtaattctgtcaatcagttgggatctgcaagatgattgtgataaaagttaattgttagtcatagcatatttttttaactgatgtaatgattattattgtcctaaattgacaggtgaagtatgctgtccagatgaacagcacaatcgggtttctgttggcattggtgattcctgctgtggcagaatgccgtactccacctcaggaaaccagatttgctgtgctgggaggcttcatgatggccatggccagaagtgctgtggcagacagattgtgagcaacgatttagagtgttgtggtggagaagaaggagtggtgtacaatcgccttccaggtaaggggcccaggtctacctttcagtagatggaggatctgagaagcagagagagtgagaaatttgccctagaaataaaacaaataagtaattaaagctcacattggttatatctaatgcaataattaggaacatattgtttaacacataacaatgtaatctcccaatttttacatgtatctcatgtatttcataaaaacgcatcaattttttttcctcttgaaaaggtcatgtcctccaaaaaaaattccacacatgaatgcattggttatgaatgaaaagaatatttcctagcaaatagtatacaaaattattataatgatattttgttataattcttttactcccttattctactgtattaagctaacactaatataaataacaataagtatcattgaatgaatactaacagacactgtgccaatattttatatattattacctcaaataatcttcacaataatcttacatgataggtactatcaattatctgcattttaaaaatgaagaaactgaagttcagacattagatattagacattatcttgctaaataccacacagtcagatccagattttgggaagcctgacatttatgttattggaggtggggcttttaaagacaagaaaattaaaatatgaagttaatgttcacagtatcttcaccaggcatagattccatctcaagaagccactttctttgctcctccctaagaagcaactcctcatctgttagttttatgattgcagcaattcagttacctcttcaggcttcacttctcattccagttctcttgctatttccactgcatctgcagttatttttcccattttgagtctaaaaccccttagtcatccatgagggttggaatcaacttcctctaaactcctgttaatgttgatattttgacttcttcccatgaatcatgaatattcttaattgcatctagaatggtgaatcctttccaggttttcaatttactttgtccagatccatcagaggaattactatctatggcagctatagccttacaaaatgtatttttaaataataaaactggaaagtcaaaatgactacttgacctatgctgtgttaataggcatgtaaacattaattttcttgtctatttccatcagagctcttgagtgaccagatgaattgtcagtgagtattaatattttaaaagaaatatcttttttctgagcagtaggtctcaataatgagcttaaaatacatagtaaaccatattgtaaacagatatgtaatcatacagcctttttgttccatttacaagcacaagcagaatagatttagcataattattaagggccctagagtttttgcagtggtcaatgagcatgggcttccacttaaagtcaccagctgctttagccccccagcaggagagtcaacctgtcctttgaaactttgaaaccaggcgttgactttttccctctacctatgaaagctctagttggcatcttcttccagtacaaggctatttcatctacaatgaagatctgttgtttagtgtagccaccttcatcagtgatcttacctaggtgttctgggtaacttgaggcagcagtttctacatcagcacttgctgcttcaccttgcacttttatgttatgaagatggctttttttcttaaacctcatgaaccaacttctgttagctttcatctattcttctgcagcttcctcatctctctcagccttcatagaattaaagagagtaagagccttgcctggactaggctttggcctaagggactattgtgactgatttgatcttctatccagaccactcaaagtgtcttcatatcagcaataaggctgtttcacttattcataagtgaatgataagtgaaatagaaatcttacctggaccacggttgaaggccataagacccacaagatttgtcatcattctcacataccttataagatataataaagagatactgtccaggggaaaagatatgttcaagaaggaatggtacagaaaagagaagaaggtctgttgaaggtgtgggaggaagaggagcattttgattttcttcaagaactgttcctttgcatgcataactgggctaactgttgggcatgagaggtctagtttttggcctgtcttggctttccacatgccttcctcaataagcttaatcattcctagcttttgatttaaagtgagagacatgagactcttcctttcacttgaacacttagaggctattgtaaggtaattaattggcctaattttaatattgctgtgcctcagagaataggaaggcctgaggagagggagaaagataaaggaacggctggtctgtgaaacagtcagaacacacaggacgctcatcaactaagctttccgtcttatatgggcaaggttcatgacacgctaaaacaattaccatagtaacatcaaaggtcattgaccacaaatataaatataaaatataaaaattaaaaatataaaaatataacaaatataataataatgaaaaagtttaaaatattgtgagaatcatcaaaatgtgacagagacacgaagcgaacacgtgctattggaaaattggcaccaatagacttcttgatgcagggtggccacaaaacttcaatttgtaaaaaaatgcagtctctgcaaagtgcagtaaatcaaagcacaataacgtgaagtaagcctgtgatactaaactactatatgcctttttaactcttattctctcctatgtgtacagcagagcttttcagatgttacatggcatgatttgcaacagatcgaatgcagactcagaaagaaaattaaattgacttctcttaactaaacatttaaaaagcttgcaaaaatataacacaatgtcattcttctattttttatttgaaaaacatttattttcataaatatgttagaatgttatagatttattattttatgtctaaatgcattaataaatatttcaaaaatttctgccgtaagttttaacacagtacatatcaacaggtaaaacccatataaacaaaaggtatttggggtcctcaataattcgtaagcgtataaaaggatcctgagaccataatttgagaaccactgcttaaagtcatagtaacgtctactagaaaattatggcaactaattagttatcctgtactatgactaaccagttgaatacctcctcctcctttagatgaagtagctaataacaggtctattaaagatagaaccaaggtggcagggagggtgcaaaagtgttacctcctgtgtactctaatacatcagagtttaaaaatgacagcaaaatatttgattttagtgtgtttgttcatctgtagctttttaaaagaattagtcaactgctatactccgtcctttgttaaatatgtattatgtagtaaccatattcaagacatcattcttggtgctttgcaagtgtaaaaatggccaagattccgtttttatcctcaagaacttacaacctaatcaaggagaaaagtgcctacaaggttatacacagaccataagagagggatgaatgcatgcatattcttaagacggagagatcactccagtcaaggtaatgaagggggttgttccattggattggaatctcaaacagtgagtatgattttggcaggtgtggcttgagctaaactgtgaaattagcaatctgcaaaacacaaataatagcgtgtgctttggtttacaggaggtatacactctgtgtaaggaagaaaggagataaatctgagtaggcaaaaggatttgaacattatttagcactcagggaagagtcaatatgatgataagaactgtagtttaagattaaatttaggtgtcagaacaaatacaatagagaaggaaagagaagtcagaacacccctggcatgaagtaaaatacatctgttctaagaagtggaatggaggttaccgtccactaggacaatggttcttaacttgttttccttttgaatcttttggaagttacaaaccctcactctgaataatagtgcatggaatatacacaaaaatttgcctgtaattttatccacccttgaactccatccatgaactcaaatttcagaatcacttctttatttactccaagatgatgtcgcatgccagtcaaacatttcttacacaaatggtgacagccctcaactcttgcgaatcaagataagctctagagtttctcatggcattctacagctctgccaactctgataatcatagtggacttaaggaataatagttttacaaaggaaaaaatatatctttttattctcttgactttctttctgcaggttgcactgaaaatagacagattccacatgtatttttcctctctctgctgccgttcactcctgtagcccctaatgactgtgaccttaatgaccttccagaatatccatatggccctttttctcctcaacctagcaacaaacagcatacctgctacataagtgtttggatctcataatatcgttcctaagcctggcctctctcgctgcctggcattgtgtgcctgccacgagaccgggctggctcgtaaaacatctctttatgtactttattacttaaactcttttatttgcctgcaggagccctttaacaaaatcacattgaattgactttctcacaccaaatcaaatctccctggtcccagttcagttgtctttgtcaatatgtattttataaatggagtgaattaacagatgctgttggaacagaagtgctggggtggcgtttatgtttttagtgctctctctgggcagatgcgttgtgtagaagtgttatacaggtatctcgggatgaaagtcatgcgtgtcatttcagtggatatgtattcttagccattttctttgaatagattttaaacctatttattactcatttttttcttagtgtttgcttatatagctttatcatttatgccattaatcttggattggacttgattatatcccttagtatgaaaaggtgaaaaattaaaacctccgtttcattcaaagaggacagatttttctattagccatgggaaactgatcatgagatgactttggaatatattgacttatttatattataaactttgtccatgcggcctttgatgtgaaactctgagttgaaattgtttcagaatacaagactgagttttcatgtcctggactctgacttcagtagaacaaatgactatcgctgtttgtttcataagatgggaatttgggaattttgcagagggaagtataattacagaagtccatggtgtaagggtggcattgaaaaaacatttccctggaagatttccataaaacagaatgattttttttttgaaaagtgtaatatatcagtgctataaaatgtatcacaatgatttggggagcatttttactctaccctctgttttgtggtggtagtcacagagccatctactggtgaagacaagtgtgaatttcttttctttcatgctctgccacaaatgttatacatttgtcctaaggatgactaatcacaaaccttttttttcttctaggcctaaaatatcccttggcttaaaatttggtccccatgaacaatctcagagtttcacaatgatttgtcatattccagactggattttactactatactatttttatctcaaaggcatgatacataattcttggtcttctttaaaaaaaagtggaatcccagttttgcagtcttaactatttagaaattcatccaacagatatgcttataaatgcttttctttttagacatagatatgaaataagcattggtaacatatttgaagtattaataatattgtgagtaaaaattttttcctccactattttctcagttgtgtccaatcaatggaaaccattggatatatatacagtttagaaagacaatatatgctttttcatctgaaaaataaacacctactagtttaatgtgtactgtaccactttactaacatctgcattttgttcaaagacacactccaccttttgtacaaatttaatgaagaggctctggaagaatggaccaatccatcaataatgcatgacctattttgtttttctttgggcatatttaaaatcgtgcattccgtgtgtcaaagttcaaaagtcaagtgctacatgtgataaattaggtaggggtcgaaagttattgcaatgcagtttcggaagattgtctgtctctgaatttgcagctcattcatgctgaagtgatgcactatgggaattactaccaaactctgctccgcaacatctgctctccctaagtgagttagtgcacgtcagacatctttatgtcagaatattgcagtgatggatgcagtcttcagaaaatgctgcataaaaatctggtgtgccgttctggccattaagtgaaattactatttaaattaatggcactgtcacagtttatctgtgcaaagaatgaacgctgattagggtattaagtaattagcaatttatcacactggaacaaggttgataataattaaagaagtaatggtttaccaaagaatctaaaaagggagtcacttcttgttatgtgagtgaaatcttggctgaaaatttcaattcagtaatacaaagatgaagctctttgtgaaagaaggcatcttttttttctagtttaaaaacagttcattatcaaaattttagttgacctgtcagaagtccctcagagtgatcagatgactgattaggagtttcaaattaggtcaatgtctgcatttttattttatacttaaagcatagtgaaaccatgaagtaatttgggaatgagagggggagaatatattccgctccctaaagggccagttttcaaattttgattgctctttaaaagagaaacatgaattgtcttcagaaaactgccagagaaaaaattaacagtaaaaaaatccatggttgtatttaaatgtctaatcagaaggggcagaaaaatgcccgaacaatataaaacttgaagctacggatttttctttttagtttatgtgtgtgtgtacactcatgtatgtatatatttatatgtatttgtgtgtgtatatatacacatacatatgcatacatacatagctacacacacataaatatgtgtatttgggtatgtacttatacatacacacatatatacccaccataatccagactcagactaaaatgagccctgctctttgtattaatttgagataacttttcctagaaatgttaaaaccactaaaattataaatatagcagttaatttgtaaaccaattacttcgaagagttatcacattagataaacatggtatgccaaagctctgttagaatcagtgtatatcattaatcataaataagagtttttaatattagagacttttgtaagtaaaaagatgaatgagagggttctttggagtcatgtgtggataaacatctttcttaaggcatgtgccaaaccaatgtctactttcaatgattttttttaaaagcacttttgatcttttatttgagtgtctttaataatgtagatgtttacacaggaccagattaaacaattcaggaccccagggcactttgaatttgaggttctttatgttatcagtcggaactaataataaacaaacaaaattccaattaaaataaatcattcatcacattgtgctgctatataactggatataaattctaatataaaaacactgtgacatgcagtatagccaccttgatttctagcttgatctgtctctagagtagtgttaatttattcctgctttaatgttaaaatttctgccatttctctttgatggcaatatctaaatgatgcaaatgcaggtaattaaactaaatttggtgggagaaaatgtctatttggtatctcaggtacgtgtgtctttcgtttagatgtggggatcagtgatcctctctacaaggtctttctgcggctgcccccagcctgtcacctgtgtctgtgatgggtctagaacagagtgaggctcaaaaaatagtggctgattagtgcacctgatcagtgaacatgctcagctgattatgaataaataccaaatccatctcatgcagaaaacatggttaccattgcagctaaattcacaagaaacaaatatttgtaccctaaataaagctaagccaaaacttgcactgcttctcccgcagggcttccagttctaggatggtgctacctttccactctgcctgggcttttatcccagagtacttgggtgaccttttctcccttatgaatttctagagctttctcagagtccctatagtttaactaaccttcttctgcaacaagatgttatcatcacaaaatgcgcaggcagttttcatgacagaaatcctatctctttttatggagcatgagagaagtttggcccagctgaatgattttcgaacatttcctcttgtgtgttcttttcctaattagtgtctagtgctcttggtaagaaggaccctcactgcacatttaaatcaccttggtagggaaatgctaccttaggtattgcaccatttcagcaactgcctgagcctgacatttttataccaaactttatagcagcctcagttttcttccctttttctatttcatattcatatataacattttattgttgcaggtatgttctgttgtgggcaggattatgtgaatatgtcagataccatatgctgctcagcttccagtggagagtctaaagcacatattaaaaagaatgacccggtgccagtaaaatgctgtgagactgaacttattccaaagagccagaaatgctgtaatggagttggatataatcctttgaaatatgtttgctctgacaagatttcaactggaatgatgatgaaggtaattgatagaaaagctctcggaggcgctgatttgacaatggaaagagaaatacattgttcataactatttttctaaaataggaatataaaaactcctgtgtgcattattcattttcacattacatccatattaataccgaatgagttcgctatgattgatgttattgcaatgaattctaaaggaattaataatgattagctgttctcagggaagctttacccagcacttcagattagtgcaggactgaaagtctgtgtgccactgaaagagccagcacaggtcgtctggggcctctgcatggtgccatttcatgcctgggagcactgtggatggaggcaggaggaaattcccgcttcttctccctagcccgccagccatcatccaccactttcctttgatagagaccttagatccagcaaattcgcttagttgcatttatatcatattcccttggacaatgcaagatgagcaaatgcctgtgtcaaaagtgaatgaataggcttctgggtgtaatcgcttatgtttttgtatggtgatggtttgtacacagccatgtcatgtatgtgggtattaaacttgacccaggataccagaagcctatcaatttaaggaaaggaccatggacactttaaaaataaacatgctaccgtgttctgtagtaatttgtcattataagaccactaaaaatgggtgtcttggtcacagacaatggaaggacgcttgttcaatgaggcaactacacagtccttgtgtagaccacatacactttgtacactttgggatgtaaaataactcatgagattgttagaagccctgcaagcactttgtatcaatgaatgattaagataacacataaggttggttaaattattctaatgaggacaatatttctccatgctgaatcaagtagtgtgtatacataataatgttcagtctgtaggtttcattttgttttctgaagacctaccacctggagacatttatatcctgttccagtctggaatggatcaccatgggatttttacatagctggcccattcggtcttccctaagctatcaattcaggaattccttttacctctttcctgtgttgattcccctgtttttttgttttgttttgttttgttttgttttgttttggattccaagtttcattccatttggagaattatcttcttgtatatagatgtatggagggtaaattttttaaaagcttaatgtataaaaatactattattttaccctccaacaggattgatagtttggtctgatatacaattccaggttaaaaattatgtctactcagaattttgaggcatttctgcatgttttaagcttccattaatattttgattcctatctctctgttggtaaccatgtttcttttcctatgaaagctcttgaagatgttctctttatcctgctcctctaaaatttcatgacaatgaacctctatgtggaagttaggatggtttctttttgcattttgttttccatttttgtgatgagagcatttaggatctactctcttagcaattttttttttacattacaattcattatgagttaggcagttgtcttccaagtaacatctctagaaccgaagccccttacatcttgtgatgcttcatgcagcccttggatcataatggaaaaggcgcaagaggggacaattgcacacagacagttcctacctggatatagagtacatcctttctatgcactagtcacacagacatatctagtcaggtggcttctcctactgcagccaggtttcaacatcccatgttcccagagagaaaagggaaacatggacatcactgagcacattgcattgtctctgccacattcatctactttccagcttccaaaaaggtatgcactgtcttgtgtgtattatttttctccattttttcttagactttcaacacgtaaaccagtattttactgtcatttagttgggcttttagaggatagatagatagatatagatagatagatacacacacatacacacacacacatatatatatagtgggattctatttatgtagtgtcatcttggctcactgcaacctctacctgctaggttcaagcgattctcctccctcaacctgccaagtagctgggattacaggtgtgcgccaccaagcccagctaatttttgtttttttagtagtgacagggtttcgccatgttgatcggtctggtctcgaaatcctgacctcaagtgatccacccacctccgcctcccaaagtgttgggattatagacatgagccactgcgcccagacccactatatatttttgaatgtactattttgatcaacttggtaagaataattcaacttattttatgtaagagagaggctgaatggagatcaattttaatagcaaaaagtattctaaatacattatgctacttatgtaaaggaaaggcaaagtagatctccacattataaaactattaccttacttatagctcttgtagtgtgggatgattaagtatttaatttccttggattaaaacaaagtggtacttatcaaaaaccataaaaaatctggagatgtgtcagagaaaatgtttataagcgtaaataattataattacaatgacagttcatgaaacatttatatttttaaaaacttggatcagtaatacttctaatgggaccaacttccccaacaacacaggaagtgtaaattctcaaatatcacattctttattttctctaaaattccataggaaagtatcaaatagcaaaaataaaatatttgtagtgtgtatactaagtttaaagacttatcagttttgagtcacacaacaaaccttggtggtaaattatatgatttgagtcacacaacaaaccttggtagtaaattttgtctccatgttccccactgaagaagctgaggttttgaaaacataagtgacttgctcaaggttacagagctgggaagctgcaaaactgaaattttaatcccaatttgtgacatttcaaagtcattgttcttcctagtatacaaactgccttcatttctttttataaattttgaaatattcattcatcaagtaagtggaggaaaaatttcatttgaaagtcacaaaagcctaccctatgtatgtctaaatgaaatttttaaatacccctctctctctcacccctgccacttgactcaggaaaccaaagagtgcaggatcctctgcccagcatctatggaagccacagaacattgtggcaggtgtgacttcaactttaccagccacatttgcactgtgataagagggtctcacaattccacagggaaggcatcaattgaagaaatgtgttcatctgccgaagaaaccattcatacagggagtgtaaacacgtactcttacacaggtaacagaaagcaagctgtctgcccatggcttaatggggttagtgagaagctgctgaaaatgcagatttatttcactctgacatcaactctccttaaactgatatcagtacattccatcatactttgaggccagctagttacaaggtaattaaaggcataatctggatgtattcaaagtcagtactttaaaatgtgttaaagtctatttaaacaaggttgtattccatattaaggtaaatctgtggagatatctgtgacctttactgctatatccagttaatttacaataaatccaatttcctttttcaaaagctgcaatgcagcttccactgaatgcattgaatgaatactgctatactcttaagcagaaagaaggatgaacctgtctgattaataataaaacctaacagtgctactctgaggatgaggtaaacccaagcatgacatttctccaagatggctggtcatctccaaaagaataacctttgcagttattgtaaatattaatttctatgtaccatcttggccctgctgaattagtccaaaatggttatgcttagttttggctgagctgtgtgagaaacactgttaagtttagaattatctctaaaacagttctgccatcaattaaatttgtgttattcatccatttacttaagtccctacaaaatgtgttcttgttttttgaaaaatcaagtttgtgtgtgtgtgtgtgtgtgtgtgtgtgtgtgtgtgtatcatctatcatcttgattcaatagaatccatttaagtgacataatttgagcaagctaaggttaataaacaagcaaaacattgctccattccatcatgaatcatcagtctgctttactcaaccaaggggcaataatggctaacctcaagagtgcagaaagtaaggcaggctactaagataagaggaggaagattaggaagggaagaaaggaacagagataaggttgattgaacattatttagtctcaatgttatactaggtactttaatttttttattatactttaagttctagggtacatgtgcacaacgtgcaggtttgttacatgtatacatgtgccatgttggtgtgctgcacccattaacttgtcatttacattaggtatatctctacactaggtactttaaaaccttatctcagttaccaacaaagcaatcatataaatatggtcatttaacagatgaggaaactgagggtcagatctgtaaaagttactcgccatgagaaagaaacatattcaaataatgccatcatcaaaagggacagactttgaagactccacgtggtgcaggagctcctttcagagtgctccaaatgcacttcaagctgttattccacctgaaatgtcctcctttatcatcctactcaaggcctaggtcaagattcttttcctcaatgcagtccctgtgctgctatggcacattgttcacaaagctcactagctctctcatgtgtcatatggatttggacacttgttccagctcttctattagattgaaacatccttatgaatagggcatttttgtttacctttgcctcgttatttggatttagaacactatacaaacaaaaaatatttcttggaatgaatttaattaggaaaggcctcagatagaggacaatttgtccaaccttctattgtgttcccagtcccagttatagatttaagtcatggactttcatttttaaattattgagtttccatctaagagagttctctacttttatctgccccttgtaatcaagatcaagattttgaagggcttttaataaatacttgtaatagccctctccagaagtgaatagatgtttccacctactgatataatgttatgagggcttttaaaatccatatttcagattgctttgcctgcagaaaatactacaaattgaatatgaaaaataacaaactgttctttttcatgaaagatgttcagcacacaagtggtgctatgataattccattgagaacaatttagattaagtcagactcttttagaaacttacacttgaaagctgacaataccagtgctgacaaaaatttattcatttatgcaatcatttatttatcaaaaattatttattaaatacctactaataactagtcactacattaggactagcagctatgatgacaaacaataatttttcattgagatttcaaccctatatgaagaaagaaggaagcagcaaatgagatttgaaatggtaatgtgggcttgaggatacagaataacagtcattaccaataagtagtttaatttgctgtagcagaaatgtaaaacatattgaccatctgagggtaggtagatggtctaggcaactgaatcgcacaaggtcattcaggtatccagaatccagaatggcaaccgaaggtatgcaattttctctttataaaatgatgtggaagttgtcagtgtctttctatactccttcaagtattgagatctgagtcatgtgaccactagaagctacaaagaaaactggcaaatgtggttttctaagcaggaggcctctgaccaggatggaagggagaactggggactcatggttgccatcacaggcaacaagtggcagatacccccgagcagaaaaaaatggaaaaggaagataatgctttacatttgtagagcaatctgcattttatgaagttctgccccataatttattgcattgtattttcatattagttctatacagtgggcagggaagggtttattgtaaggagatgtatataaggagaatgtctctccattaatctaagcatagagactgagaattaactccacgtccaatggagatgagcaggtggccaggcagccaaggaggaaggcctccttttctgatgctcaatctgagaaagagtcatccagaagctaacacacaaaaatacatacatacttacttaaaattcatcaaattagagacatggaaaataaatttaaataattaaactttcaagtaagtttttcaggggaaatgtgtagcattggtatttccgaagttattaaagcctaaatggaactaagactttggggacacaactgaatcacatgagtgttcatctaatacaatttttgccagtttggaaagctcagcaggcttggttttattgttttaataaagttggttggtttgtattttggttttcagttctggcttttgtggaagagggaaggaactagatagcagagtatgctttcatttttattcactaacatggtaccatgataaactaagtttcaaatcctgtatattgtaacaacattataatccatatgatttaaaattttttaagtaatattaacaaagtaacagaaagcaataatttataagttctatgatactaaaactataaaagaatgttgccaaacctgtctcatgtaggaatcaaaactacatgaatttgtgaagcactaaatcttattatacatgattccagtgcttttatttttcatttatttaatatatccctctttctctgctcagaaacagggaattctattctgtgcaattccgtatccctgcatctaataaatactttaaatgttacttatatttagaaaataaagatattagagttttatttatatacaaagcgtttagagcattaaacatttatttttaaatgtctaaagtttttgatattcacttttaatatgatggttaaaaaatgaaaataagagaaacttccctgtctattttttctctttccagatgtgaacctcaagccctacatgacatatgagtacaggatttctgcctggaacagctatgggcgaggactcagcaaagctgtgagagccagaacaaaagaagatgtgcctcaaggagtgagtccccctacgtggaccaaaatagacaatcttgaagatacaattgtcttaaactggagaaaacctatacaatcaaatggtattgagatacctttaaaatacaaataacaaaatcccataaattcataagaaaattgaaatgagtacaatctacatttaattgccctatgcatctaaccactagaaaagtatgttccgataaagggaactgtaattatgtgacaactaatcactcactttgtggtgtagtcctcgtagatttttagcctaaataagtaaaaaaatagaaatgaaagttccttgaatcccagaatatatctgagctgctttcaaaacaagcaaggcatattcagagaaggggaaagagttttaatattgaaagtaaatttgtttcatagtgaaaggaaataaacataaatgactcttatcatttatgtcaagaatccatctcctccataatagtataattaggaactgcttgagacagcaatataataggaaattaaaattaaataaagctatagtattgcatttcttccgaacactaagatttgtaagttgtttgcaaatagttaaaatgatatcacattcaaatgcagtcatttttctgcttcttttaggtcctattatttactacatccttcttcgaaatggaattgaacgttttcggggaacatcactgagcttctctgataaagagggaattcaaccatttcaggaatattcatatcagctgaaagcttgcacggttgctggctgtgccaccagtagcaaggtaagaggagtttgcctaaactctgggaaaaggggttcagtgtgaagattatctgaacatccaggttgtgactgcttttttcattgaagaaaacaatgtccctcctcaaagtggtgttaagtagcgtgttcatgtgtcacgttaactgagtgctaatacctatggctggaaggagagatcatttcaagggagatttatccaaatatcaatcttgtgttaatgaaaaacaagtgaaatcttgaagcagtaccatcttttcttccacattctttcctcaccaaccaattttaggtaatctataaatctataaaaatgtccaaatcattattcagttaaagaaagtttctatttaaatatgatatgaacaaaaattgtctgattttaaaaaatgaagagaagggcaaaaaagcctggcacggaaaacaaaattgttccaagccttctgctatagccttgtcaagaaataatgaagacctgaatttaggcagcagaggtcagaaccgagaatacagaatgatacaacagacatgggggataaaatctacaaaacttggtactcaattatatttacagaaataaaaggaaagagtcacggatattgtcaaatatctgcttgagtaatttgtggatcatggtgctattctgcaagcaaatttttaaaaaagagaaaaatgttgaaggtaaaagaataggattctgttttgttaagttttgtaaaaaatatatttaaagagaaggatcagatagcagggtggcggaagcagatagtacttggcactttatgtgaaaatatctggtcagaaaccagattgagaggtgactgaagtttctagaaagatctgtatgggaagttgaagtaatgagtataaatatggacatggaaggagaatagagagaaacaaatatggaatattgtggatgatgagcactggggaatgctaccaaatgaaaaagaaagaaaagcccacaaagaagactggaaataaacaatcaaacaatgtgggagtaaaataaagaaagggacatttcatagaagccagccttgacagaggaagcccaggaggaaacaaacttacacagagtagctctgattcttttcatatgcttaaaactttagaagagcaacatctttgcacactgtgcaagagccatccaaatgaaacattcagccacactgctcagccacagtgcaagaatgcaacattttgttcaacagacttctggaaacctttctgagtgagccaccatttagatagatagatggcagctgattggcccagtcaaaagttattagtcctagaacaattccatgctttttgcataggcacacttcatgcctgctacatgcaaagcaattgtttacaaagtgaaaaaagttaattctatgaaagaagccaatttttgtccaaaactatgttttgacaatattgactaagtaattgatttatttttttcttctgacttgtttctttctttagaaagttggtgcagacactataaagtcatcctaggtatcatgggaagagtaccgaaatgtctgcccatttattctgttcaaagcatattgtatgcaagcaagttcagatgtggcttttgctccatatttactggtgcttaaaatgtatgaaatcaggctgttaaaatgcaaagacactgatgggccatatggaagagagttatcaagagttctctagtaagacagtctgccagccagattttacttgtttaaacactgagggctgcactctgccgtcaaaattgttgttgaacctgttgtgataaatggtagtgtgagacttatgtaatatattcaaggtcagatttcattgtttaaataggttgggagggaaaaaaatgaaaaaaaagggaaatgcttctccaagcccctgctaatgatatgccaggccagacaacattttaaaacaaaagtgacattctcattgatcaggatagctagtgcactattacaataaattgctgcttaattcctacgtcttcaggtagttgcagctactacccaaggagttccggagagcatcctgccaccaagcatcacagccctaagtgcagtggctctgcatctgagctggagtgtccctgagaaatcaaacggcgtcattaaagagtaccagatcaggcaggttgggaaaggtctcatccacactgacaccactgacaggagacagcatacggtcacaggtgagaaaacaaaaaaaaaggaaatcctactggaggagtctgtcattgtggttaggggggcaaagcatcccaggggtgtgtgtttgatatatgaggtcacttcgaaaggacgtgttctcttgacatatggtcaggtcccacttatccatgctaatagaagagcccacactggcagcaatacgccacaacagcagataacttcagaaataatttatatttggccttgatatgcattatgtgaagggtttttgcatcagtattaactttttttttcaaacaaacagtaagatgcattttcattccccaaggatatactcatagttaatgggactaagatagccaagaatatactggaaggcaggggaaaatcagccagaggttaacatttgtctatcaagtggataattaatacacaggactagttgacagtggagtcattgtgactgtttgttactattaggaatgttaattaatagcaattgtgtttttttaatttattataatgtttattatcattagccttaataatatactattagtacagtacaatgatatgttagataattgctagtagtgattatgataataattaacaggttttagcttaaatgccacttctgaagggaggagaagcattttctgacttacttgctcgaataggttctctaacacaccaccacatcactttgttttatttccatcatagacctctcactgcctgatattttagtgtttgttttttgtctttttatgtctctccacacttgaatgtaggctccaagagagcaggaaccttatctacttgttcagtgttgtacctctagcacttatagtcctgaacacattaataggagctaaataaacgtttggggaagaagggaacttaatatgtgccagacgctgtcctaagcactttgagtgcactatgcaatttgattctccatcaccaacctaagatgtacagtgaattactaccttcattttacagaaaagaatactttgagaagttaagtaatttagttcattattcgagtctactgaatcatcccaaacaaccctgttaagtttaaattctaagaccatgggcaagattgtataaactttcccttttttcccattgtcagccacctccttccaagacttcctgagtggatgacctccttccattggactgcactttttgcagggggtgttgatagcacagataatgaaactcacagaaaagtgcagaaaggccttggaaaaatgtgactgatttttcctaagaagggacacaggttacacttacacagggtggcaaaataaattcatcacttttcactcttaaatgccacaattccctaacacataagcaagcattcattgacaaaatctccagtatttttccaaaagggccgtaaacctgcagaaggtgcttaatacaactcttggcctggcacattgtattccttacctcaagatcctgggctaaatcaatgatgatagtgttgaggctgggtgcggtggctcatgcctgtaatctcagcactttgggacgccgaggcagccggatcacctgaggtcaggagttcgagaccagcctggccaacatggcaaaacctcgtctctactaaaaatacaaaaatcagttgggcatggtggtgtgcatctgtaatcccagctactctggaggctgaggtaggggaatcactccaacctgggcggcagaggttgcagtgagctgagattacaccagtgcactccagcctgggcaacagaacgagactctgtctcaaaaaaaaaaaaaagataatggggttgggagaagccctcatatttgaatgatcaaaattatttcttttatcttattttacttgaagtggaaatcatcacaagtgattgaaataatggtgttttacataataaaaccttacttctatgtggtgctttatcatttaaagaaacgtttgcattttgacttctctgactctcatcacatccttgtaagagatgtttttaataatcatatctgaaagatgaagaagaaagccaacctactcagcgtatccaaggcattcactgcctgtatctgaaaggaaatcagaatatcatttcgttctcccaaaaatgaattgccagcttgcagttttccagatagtacactaagtggtctaaaataagactgctgctcttaagatcctctcacgtacagggaagactgacaagaaaagaaataactgaaaacagagctctatacaggatgcagtggtgaaaaatcaaatgagtcacttggagtaagcaatgggatgttaattacagggttttgaaaagcaagtttaggcacattaagactgtaccagcaaaggtttcacaataattgtgatataaggctaaagaaatttcttcttgtagtatctatcaacttaaccagcatcagcttcgaattgttgctactttattggtttgcattttttagaaatcagcatttatacaccaacagaccaaattcaattgtaatgttcaaaccaacaggattgatagcctcattaattataaaataattgcaaagatttttctctaaataacttcaccctaccagttcttcctttcattgacatttttaatggctatttttatgtcagagtagatttcatacatgtatcttggtgccagaaatcctattattagcataaatattttaaggttttttaatataattttaatttttacttaacagtaaaaaatcataatctggtaaaagcctttaggagtcctttgaccaatctccctgttctacttttgatttgttttaatttctatggatattgttttaaatagatttagagagtatttcacttgcccaatacagccctaaagaggggtttctttgtagaataaagaaataagtcctcattcagcaaaaccttaccaagtacagagcctcctatatgtagttctttggggacaggaatggtgctaggcattagataatcggaaacttgagatctatataatgttactcatttgcccaggaaaattcagttccacggttagctgactgaccaaatgtagtactgaagtattttatggtgtgaatgactgttttattgagttcatggaatgaactaaaataatcaaatttattttctgttccatcttaaatgtttgatggaaatgctgcctgaaccccctaggataaatgttttgattttctcatcatttccaaaagcttggcattccctaagcaacacagcactaataaagctgtagcactagtcgtcctggagcctgaaaatctaggtccttaggaatgacaggagggaaagggagcaccttgcctcggccccattgtctccatgcttatttttaattacctcaaagctttagaaacatgatcccgtaaatgctttgtgggaatagtggcgaatgcactcatcatgtgaaatccataaattgcttataatcctctcaagatgttaaaaaaagcattaagtaattgaagacaggaagtcctcggttaattatttagaggtgttatcaatgctttaagtaaactgaagcgttttctgctatctcactgagctgaataccatggggacgaaggagtagcagccatcatcttctcatattcgctaatgcaaacagcgcatggcagcttgtcaataaaagaccttttcatatcatttattactaaacacatccaccatcctgtacagaacaatttggacatcagttatggcattgtttcactttgggctacctctacattatacgtaggcctcctaatgtgagtttaggaatagaagaaaggattaactaaataattaaggccactgagaaaaaaatgaattagtcatgtcctgtttagcataacgtataataagggcctatgtgtctcttactctggaaaactattttcaaaataattaattagaaattactcatcattgcatttcatttaaaaggaaaaactcaccagcattaaattagcaaggaaagaataatttactttcgtttctcatcttcctagaagttaatgaaaactttgtgtgctaaatagaacaaaccctaacaatgctggttgtagcagaaaatgtaatactaatgttatactgaaacagataccttacacttcaccttggaaaaagagaaaacatactttaaccaccaatacaacaaaatgtagaaattctttgtaagggattttatttttagataactctgctatgtgttcccatattatctttgctctcgtagtaattatcacattttattctaatagcctttcctcttgtctctgttccacacttagtaataggtaatgctttttaagtacagagacagtagcttcctgtttgccattgtgttcctggtacctatcacagtacttaatatattcaaaaaatgtttgtcgaatgaataaatactgaatagtaaactagtatttgactacattctgttttgaatggagataaaaatgccactgtcaaacgtatctaaatcgcagacagatctggcaacaaaattgtggggtccagtgcgaaatgaaaattcaggccccttgttcagaaatcattaaaatttcaagacaatggaagcagagcatagaagtaagctcatgtgcttccaagcatggtaccgtgtttgattgcacagtcgaagcccacaaagccaaccctgatctccagcagtctggaattagctgcagtatatttctttaattaaaacagatagcaagaaaactaggatggtgataatgtcctcaaaaagctttgggagtttcttctatggttgtttgcaatgctccaggctgcattccccccagttactatgtaattactgaccaccaagcactggggacctgtgaaaatagagataagaatttgttttcttttcattttttcaactctgagaacaactaaatttgtgcctgaccaaaaaagtaaaaaaaaaaaagaaaaaaaaaagtgtggcatcaaccacttttttgtgttttaaaacctgcctattgataaaatattaaggccaaagaactataattgatagctgcctagacaatgatattttttaaaattccccttaaatcccagatattccaatgtactttgccagatactagttctgttttgtcactccagttctggccacccccttccctctgcaatgtcctcattgtctcacgtttgagcaacatcagattttgctgccacctgacatcacattttgtttttagagaagaaaagtctgcctggaaatgcagagaagaatcctcagtctagcataacactgaacttgaaagaggaaaagtatttattaaaatatttattaaaatactgtcactaaaatcaaaatatatatatcacagatataattcatattatatttttgttgttatatttattccagatatacatcaacattaagactattatttagacaccaccaaagaaaaagggtctttccttggtggtgtctaaataatagtcttaatgctgatgtatatctaaagagagtctgccaaagaagtaacttgtttaggaaaggcgtcttgggatcaggaagatattggagagaggggcctaagctatggcccagaatttcaaatgaaatatagaattaataacgcaagttagcttatagcaagtagtcagaactaaaagtcatgaagtgatcttactggcatgtgcaatgcaagagtccctttgttttgatgttttgatgttcagttcatatgaggtagcaactgaattcataaagcatgaatacagaaaatggacagtacaaatgctgctcaatgggggggaggaaattggcttgggtaagtggaatgggcagctgttgagattgtgaagaatgataccatccagaaaagatggctttagcatgtgaactcccgaaataatccttaatcaaatcctgtaaaacaaattctaatttaaaggtaccttagatgtctgtaaagtaattccatgatgcctttgtataccagttttgaacatctggattttcacagattgtcagattgatctaagtagaatgctgatatggctctatccatcacagtcaagatcaccaggggatgctggaagttcctgggaatctcagtaggcagagatgctccgaaagggatcacttagtgagatcccaggcaagtgagggcaaaaggaagcaacatcattatagttgtctgggtatatactctggggctcgttgtcttgcgccaagaaagaattcaggacacagacacatgtgggtgtgttaaggagtggaaagtttaatagaagaaaggagagaggagagcagctccttgtgagagagagagagaaagacagagagagagagagagagagacagagagagagagagagagacagagagacagagagacatccgtaaagtggggaggcagcggaccaaagcagattttacaggcaggctggagaaggcagtgtctgatttatatagggctcacagattggttcgatcaagtatgacatttacatagtgggaggggaaggctggtcaccccaccctaatcttattatgcaaatgggccttccagttgattggttccatcttgtctgagccttacagtacaagtggctgacaaggagaagggaagatggagcctccatcttgaacatgtacagtccttagttcctgcccacattcacccatgcaagcacccagcttgtttacctatgtctgcagctcgattttacatgcttgccctttgttagaaaattatttggggctttttactaaaaagaaaaggcttaccgaggactcccatacctttactatctgcctaagtgatttcttcttaactcctgtatcattagcaaggactgaatgtgagcagccgaggggccagaccacacatccagtttgggtgaactggtgccaggacagatgacttacccgcaggatggttattcacaatactttataagcaccaaacaaaaactttttaacgtaactcaggcctctcagtgcttgagctaatcactaaacatgctgatggaggaactcactgaattacacatcctttaggactatttggtaattctttagaacatagcagatgacactatagaataattggctgaatgttttgaagtagcacttgctatgtgaaattataatggctaaagtgcctttttttgactatttatcaagagattaaaaattggaagcaagctgttctttatagagtacatcaaatgttaactttcatagacatgggttttgttttccaaatcatatttttatgaactaaaggcagactttttgcagtcccttttagcacacatttactcttcaaagtaatgttacttggaagtgtaattgtaatgagtttggttatattatgcttctttcctttaaaaaagaacatgattccctgtagggaaattcaggtaatttgcagccacagtaatcttcactatactgaaatgttaaatacttggcttttctccatgtgtttgcctttctgtactctacaagtgctatttcctactcttctaattcaatgctgagcacttgaatgatgttttcttttctccttctactcttcgacttcaggattaagttacagttggaatggttcctttgagacatctctttatttccctcttctcatcctgatcaattcatgagtagttttcaattggtgtgccctttttattgcctgttgctagtatgtcatatatatctcattttaaggactaccgatagaggcttacttaaaatgacagcaaattccagttgaaatgtgttcattttattgagttttacagagtcgtatatatgaaaggtcatcaggttcatgtaaatcatctatgcctgatggtagttgatgctttcttacagattatctgaaccaagcctattagtaatccagtcctctaacaatatgaaaaatataaaaactaaaagatagaatatggttttaaattttctaaattatggatttagatattgccttcccttaaattaatctgtaggcctattaagcagtctctactatcatgcctacagtttatagatatagaaactgaggaacctagaagccagaaaacttccttgtagtctagtacttggtaagtagataagtattagaacccaaatagtctaatttcagactgctctcttagcacagaacatgactcagtatctcactacatgactcataataatattcaaaatgaaaatatttaaatatatagtcccacttgaatttttttttttttttttttttttttttttttttttttttttttttgagacggagtctcgctctgtcgcccaggctggagtgcagtggcgggatctcggctcactgcaagctccgcctcctgggttcacgccattctcctgcctcagcctcccaagtagctgggactgcaggcgcccgccactacgcccggctaattttttgtatttttagtagagacggggtttcaccgttttagccgggatggtctcgatctcctgacctcgtgatccgcccgcctcggcctcccaaagtgctgggattacaggcgtgagccactgcgcccggccgaattttttatattactggaaatttgactgggctttgagctatttatgtcatcgtttttgttataaggctgggaagcctaacccagttgctctgggccacatttctcagtgtaattgcccaagttccaaccttggcctcaccctttccttttctttctttctttttttttttaggcagtctagctactatgtcacccaggctggagcatagtggcaggatctcagctcactgcaacctctgcctcccaggttcaagcaattctccagcatcagcctcccaaacagctgggactacaggcatgcaccaccacgcctggctaatttttgtaggtttttttttttttttttttttttttagtagagacggggtttcactatgttggccaggttggtctcaaactcctgacctcaagtgatccacccgcctcgtcctcccaaagtgctgggactagaggcatgagccaccgtaccaccggtcccggccctttcttatgtctgtgatcataggtactttcctccaactttctgtgccttagcttccttatctgtataatgaacaaataatagcgtgcacagcagaaagttagtgtgggcgttaattatattaacacccatgaagtgcacagaagagggccaactagtagtacatgctcaataaacttttgctagtatgtcatttacataatcttataactaacttccttgaaaataactgcaattctcataaaatatatttagataatgtatagagtccaatgaaaagagaattaaaaacagaccaacaaaaacaaaaacaccctgagttttgtctgttgggtattttttttcttaatttatagtttttgtgctggtgtttgaactacattcttttaacttttttttttcgttttgagcaactacagtgtatacaattatgacttgccaattaaaataatattaattttaataaagagcagctgcaatggtttctaccatttttatgtcttctaaatgctgcttaatcttcagagggaaggcagccattgagtaacttaaatactgttagctctagctcttatgtgatggagaacatagagcttggtattcaggcttgggtcatctatgcactcctcagtccaggtgaagtcaacgctaaataaagtacaaagcctgatagtggacaaatgactggcttatccaaggaaaatgtgagttttgttataaaaagcaggaacagaccctggaaggtaaatatggcagatgtgaagttgcttgacacacattagcaaacatcatttgaaatgagcctaagtattactaccctttgcccacatggtccattaaactggtcagcatggctacatttcagggacagacacagctcttgaggataaagtgccaatgaattagagtaaaactgtcattctccccatattcacttgcagacatgtctcccactctcatcctcctggttcttcaatctttgtctcctttcctcagtgcaccatgttgactcctcttgatttgataatatgtttgaactcctctgacttcttgacgaaggttttctgctcagtgctgagtctgccattcctccttgattctagtaccccagtagcttcaagagaagcaaattccttccaccagccctacccccatatcctgctaggtgaacctatcccatctaatgtaaacacctgtagcaaactcctttgatgcactttcctccctctatcaaaaatccttaaggtgctggatgctctactgctgtaccatgcctaaacacctgccttctcaaattctaggctgtaagtaaaatggagaccactcaacttgcagcagaaaggctttgtcaagaaatgacaatttatatttttatatacattaattttcctttcagctacgattctcattacaaatacgcttaatcctctaatcaaccttagcaaacctctgtgattatgaattttcttttttccctaatgcccatcctaaaattttatttaacagtcactgcatgtctgaaatcagaccagccacgaccacaatgaggaagataactgaggccattgttttgctcagaatattcgagaaaaaaatttaaatatctgtttacttttagctaccatatttacatctggcattcaggaaaaaatctagaatatgtgtattgcccacaaattatattagtttctgttattttattaatattctgcaactaaaaaatatctccaactcaatgaaatcattgctgtggacagggataccgatggaattatgaggaaggacctttttggtcaggtcacatggtgataaacatcgtagcctcatatccctgcaatccttatgggacactatgatgggcatgctcttctttaagcaatatttgttcaacattgaatgcctaaaaatgggcactataggggaaagtgacctcccaaaaagactcgctcagtgatgccatttctactctcaaagggcttatattctaaatggggaaaataagatattcaggtaaaatggtatcacactggtcaagacccctttttgtcggtaaagagaatgaaggggagacattgtcgagctaaacgagtttgccactgcaacctctgagtttcattcttgaatgttcccttccattattttgagctttacattttgtaatcatagcattttccgatgagcttttatcaaacatatgtggcttgggtacggcttagatctttagtcatattcttcatctgtaaatcaggtaaatatcaaaattatgtaaatcctccaaagcaaccaaatggaagattgtaatcaaataagtgcctgcatcttatcactaagttgataaaaaaaatacaaagggctctgaagctaaaccttggagcagctccagctgcagaacattattgctttagcagagaacccagactactgctctcattctaaatggatgagatgggtaattttttcattcgtttaacgaacacacactttgtgcctgtcacaatcctaaggatacagataggcaaaacaaagttgttgttctttcagagcatacatctaaagcaggagacaaatatcaaataagcaagagacacagcaaacatcagagacggttgaaggctctgaaataagaaaattatgtgaggggataaaaagggatgggtggattgtttagataaagtggtcaaaattttttaaaatgtagtatttgaggagaaatctgcataaatagacaaagtgacacattaacatctctgaaggaacagtcattccaccaaaagaacaaaatatgcgaaaatgtagctcaaaatacgtgaaaaaataagcataacaatcattggattcatctgtaacttagttcaattatttaacaaataggctcagtcctgttgttttaaaatactatttttttctcaaagagagctttggcattgtttgaactttcccaagagtcaagagagagatgtcttgtaagcctcaatatcctccttgttgaatgctgctgagctttaaagttgcttctgctagaatgaaatactactttgagtatcctatttcatcttctcttgtctgctagatgctataatgattccccattttacagatcagtagaccaaggcaaagagaagctaagtaactctaacaaggtcaccagccacgcacagagcagcgaaatctaacaatatacaacttctattttagatggattgtcattcttttctccctgaaaacttactgaacaattaccatactgcatcatattctgaatacgaaagaagtaataagcaccatctcttctccaaattagctttaatctatgtgtaaagacaaaatcaacacacctcaaaaaagggcgcattagatacagtgcaaggtttaaaaacaaaagtgttggttagcgttaatatgagttgaatatggcttggggcaagaaaatgttggatctaaccttctttttattttcctgcccgtatttatataagaagcaattgcagagactgggatggttagcctggagaagagaagactcaggggggatttgataactgtctacaaacatttgaagagctgtcatgtggaaaagaaattagatttgttctatatgtccccaggggtgaaagtgatagaaagatttcatcacaatataaggaaggactttcaaacaaaataaggataactctaaggctctctaaagatgtaatgggctctttgagagacggagtgctctgatccgataggcaggacagccttttcaatgacatcttgtatagggaatcaagagaagggtggatggttcacatgaattttaaggtcttttctatggctgagaatttattagtttatcagtgataaatgaaattttgcccaatacttagcctcttatgaggttcagaccttctttaaagagtgttttagagagtactcttaaatgttttggctatcatatctacaactctgcatgttacttctggtacttaattgataataaataatcctcttaaggtgcactttatttcttgcttgctttttctaggtctccagccatacaccaactacagcttcactcttacagcttgtacatctgctgggtgcacttcaagcgagccttttctaggtcagacactgcaggcagctcctgaaggtaatgaaacaatatccatggtttgagggaagaaattttcacatagcattttgaggtggaatctgtaaactccttcataacaaataaggaagaggcaataaagttgataggtacaaaataaaatagcattctaggttcccattcttcaggcttgattcatgtaggtgtagcttcccaaggtcagttcgctttcaattctttaacctttatagagttgattttctgtggaaagaagaattattgaaatttttcaaaaactcagatgttaaatattttgggagcatctaatatataataagcaccatgctcactgctgaagttgtttaaaatgttctctgccctcaagactgacaatcaagtagaagtgataggagaaagatctgtatgaagagagaaaatctgaaagttgatgttaagaaagaacaaatgaatagagtgctaaggttggcctgaagaggaagagatagaaacccatcgatgacatcaaaaaaggctttatggagcagatgacttctgagatggaccacaacaaacaaggattttgacaaatgaacagtgatgtacagagatgtacaaccagacacagttggaaggaatgtaagatggaatcatcaccttagaaggcaaattgcaaatgtctatcacatttaaattgttaatttcccatgatacagctgttctattttcatcatttatgccagaaactgtgccacactgctcaaggaggcatgcaccaggatgtttattgaagcatttattttgtttaatagcaaaatgttgggagcaattttaatgtttgtgagtagaattgctaaataaattcagctattctcatattgtggaattccatgcaccagtataaaagaatgagatgatcagttcatacaaagaggaagttatgacattatattaatttataagaacaaactgagaaaatggcatttattgttaatggttaataaataaatgcatttaaaaatccaggaagtatacacaccaactgatagcaatggttacccatgtgttcagaggtgggatggctggtgtcatttactttcaaaagaaaaatatactcagtggcatgtgttagtgatcaactaattattttgttaatcttcattatctgcctatttttcatatggggaaaccaaggcataaataagtttctaaacagaaatgcaatgttaattaccaccatagactcctgaactacttgtccattactcttctaatgaaatggattgttgtacctcggaatattagacctgaacttcctaccagtaaatggggaataaaatggaaaattccacatatggggcatatggctcctcaccaggaattcactaatgatgttttctatataaagaatgtttcatgtcaaaaagcttagtgttcctttgaaaggaagaaaccagcagtggattttttggaaaggtaaactatcaaatggatactttgatgataatggataatttctaaaggatctatcaaccagatttggctgaaactcaacctgataaaataacagaatctcttgttccatttctctctaccaaattcatatatttaaattcattggaaatatgaaattttcccaacaaaatttcttgaaatgacttacattttatgacttaaaaattgtagctttcaacagtgcagggtaatgtgatatgagaaatgcccttgatttcttttttttttttaactttatgtatctttcctctaacacaaataatcatgcaaagaaataatagatgaaatggactttcctctgcagaagaaacatggatttagggccattttctggctgaataagtgccatttatatataacccatatatgaaataaatatagtgtgaatgcttaacttgggaacaccttagcaatcacattaagttctgttgttttactgtaaagtgaaaacaagtataccactttagattatccacccagacataactaattataaaatgccattttcgaagtacatcagatataatttgaagatctcatatttgagtattttaagtggacatggaaagaattaaaagaagtgtttatgcatagccaacgcaagctgagctcttttcacttgcctctcattttcaatctaagaaaaagtcaatgtacattacaacctcattgacaagttggacacagttctctacagttttatcctcatagaaaactgtgtacctgtacctttagtcaaataacaggaagattttgaattgaattattactctttttttctacaattactgccatccatgtgagttctaattcattttagagataaatcatgcaaaattgcagacatactttcctctagcattgataatgtggaaacagaaaggaaaagaagacccagtctttttcagttcattccagattcctcttcctctgcccttcttttaacgtttacacacccttggttttttcctctactctttacactatagcacccaggctcttctggaattttcgagtactggctttatctcctaatgaaggctgagagctaccaaatactaaagctctcaccaaagctacacttatggatttaaatcctatgtatttactggtctactacatgtttatatttaggtgtttttcaaaaactttaacctcagtacttcgccacttaattcttccactccactctactcctcaacttgcttttcttctctcaaatactaccacctacctatcacctaagcccaaagcttgacactcttgatggctcccttttccatatgtaatacataattttttataaaatctaattagttttaaatcttaagaattttttttaaaaaaattgttcttctttcccgtcccttttaacactgccttagttcagatcctcatagctataagaagagaagttctctggatcctcctaactaggatcccttcctctagtcatttttcctctttctcacatcccacatcctgattctttttcctcttttgacaaaataagaatatgtcatattattcacctccataaagtcccatttccttccaggaagacatacatccatatctccttagcaaagcaacatggacccctcaagttttaacttccatcaatttttcaaggctttccatcttccccacatgccatgcagtgcaccagccatgccaaggtatgtgcagtcctgccatccttgcccacatttctacgactttatgtgggttcccctcagcctgaactccctttccctacatcctcactcagttaacgctcaccttttcaaaacttggttcacgcatctccccttctggaaatcttccactacaaccacctacttcctacccatctccacttctccccacagtctgtgtcaggttaccctttctaagtgttctaacagctactgtgcctccttctcttaaagcatgtatcatactggagtacaactttttatcgactcatctttattcaccatgatacatgaactccatgaaggataagaaaaagtctttatcttcccatccacagtgcccaacacagaaaatgacacaaagtcgggtagaatgttgagtgaataaattaacaaatactaaattgtccagaattcagtgcatccctgacatcagctaatacaaaatttgttcctatcaccagatttcaggagaaaaacaatccacaataaatgctgggaattttgaattggaatgaagatttgtagggacatgagaagtgggtaatatggcatgcaactcaagataaatttaaaacaaatacagtagacatgttctacttgttgtcactgtgtaaaaaggcccaccaaggtttaattctacctttccccttttaaccttgcagctagtttaccccaccccatcctcctaggttacttccctccctactattcatttctttcacttgaactgcctcagtttgctcccttattatatagaataggtttttctggtttcacctgagacttaggccagagttacatggtgaaggggacaaattccccacctcggactcattaatatatctcaccaaagattgtcttactctagcaaagatttcttgcagctgccaagataacgatgtccccatatcaccatccaagtaaaaatgcagcactttctagttatatatacatttgaactccatattatcaatcaaaccaatgggcatggagttattaccaacttgaaaagagcttttgccagccggtataaataataaactcaacttttacctaaaggttgaaacaaacccaaaattatgtttcattttattttattagctcctccacatccacaggctttattgactggttcaaatcagaaaccaagcaatagccattctagtaccttggtgatttttaatacatcgttcaaggtgaaaaagatataactgcaggaagcagattatgaattaagattttatactttatcttttgaatcaacaaattaatatcacatttaaatcaaaactctgattggttgaatcatctagcagctgttggcagagaaacccacatacaaatgtgtactatgatttgtgaattttaccaaatatctagaacagagcagactctcagaacaaaatgaactactttcttctcaggaatatattgctccttagaaagttgggatgtttgagacatttttgaaatctatcttgtttctttcaggatgctgctaaataaattgcattttgttcttctgaaaatttttcttctaaaagtgtcaaaatcttaacctgtacggagtaacttacacaggagatacaatcaagcaaaagctattgattacagggaacctaatattgaaatgagttttttttaatctccagaagagatttacagtgtctaatcagagtataactagatgacaacataaagtggtaggactgaactttctcactgctggcttctccatcgatggatttgtacatctataagagtacttgaatgtttgacattgaattacagttgtttgtgtgtatattttattttttagacagaagtataaactccttgaaagtgagccacatcttagtcatctttgcattccctagaactgcctgcagtgcttagcataacattttgcaggagatatatttacaataaatctactcattaaacatgtattaggcattgtgttatccatagagatacattgacgaataagacagagaagatccctgctaccatggaactaactttgcatcaaagtaagagaaaggagaggactgcaccatcatataatgtaaaaataatagtatgtcaaagaaagaatttgattatgatgtcttgagtgttaagaaggaaatagaaaaggccatgcgatacagagaaactaggttgggactccattagatggggttcaagttagagttaagagagtgctaaaatgaggccttatcaataaggtgatagttacacaagtaactgaactatgagaacatatgagaacattctacatataagaacaattctacatatgagaacaaaatgcaaaaatgtcatgctgtaagggaacaaaggtgttccaggccaaaggaaccgaagttcaaaagcccaggtgtaggaaataactagaagcattctagggatagaaaggaatctggtatggccacagctctgtgaatggtgcaaagaatgctgccacttaggccagagccaataaaatgtgggaccatatgggtcacaaaaagaaattgggattatattatatgaataaattcaaaagggttatatggttcataaagatgacactggcttacatattcactttatacacttttacaaagattccaatggaatatggaaggccaagatttcgacatggaggcaagtttagaagctatgacaggagtttatgagagagagaaacgtggcttggaccaggagaagtgaaagtaaagatacaggaaagtatacattatagaatcttctgggctttatgttagattacatttgggcgtatgaaaggtgaaagtctcagggatcattatttttgtgtgttttgtccaagaaaatggatagatggacaagattgggaggtacatagattgtagacaggaaaaacaagagttctgttttgcatgtttttagtttttgatatatcatcagtcatccaaatggaggtgtcaagcaaacagttggattcttgagtctcacactcagagtttcaatctagagatatgcctttgggggtcttcagcatatgcatatttaaaacccatactgaatgaagatcacctgggaagccggtgttggaagagaagagaagagagaaaaagaagaagagaaaggaagagagaaaagcagaggggagagagagaacagagcatactgctctgaggcattacatcctttcaaggtccaggaggggaagagatcccagtaaatgaggccagaggcatagccagagaggaaaagagaagcatcacactgatgtgcaagaagaagggaaagtgcactcatttgttgaattgtataattcaggtacatactcgattatgcttactttcacatattccaggtaaattgtattaaaaagtttgaaatccccagatgatctctcaggccttgatttaaaatactctcagagtgacaaccaaggcagagaaattatccactgctagttgtctgacattcactttccaaaggcaattcaaaaataaaataatcaaagtaataaaaatatatttacaccaattatgtatttttgttccatacagttagatattttttaaaatcaacagaaaaaatatcacagttcatgggggggatggtgtgacttttgatacactgtttattttctcctaacaataaaacctcattgcgttattcttgccaggagtttgggtgacacctcgacacattatcatcaattctacaacagtggaattatattggagtctgccagaaaagcccaatggcctcgtttctcaatatcaattgagtcgtaatggaaacttgcttttcctgggtggcagtgaggagcagaatttcactgataaaaacctggagcccaatagcaggtaaactaaaagaaaactttaccaatcatacagcaggatttgtacatttctctgggttgataagaaatgcatgtcccactgaaagttgttaaattgtttaattaacttcctcattcattggccattcaataactgatgaaagtgctaaatcattcagtctttagacttcacgaaatttcttaaaaatataaataattcgtcttctgtttgacataaaagcatgagaatttttaaatatacaaaatacatgaagtattaaactttaaaaattaccaaattatcttcaaaaacacgcatccttgaactagcaataaaagagatgtaaagagttttgttttccgtcaactctcttttcttcttgtacagtgtttctctacttgctacaccacatatagttgtgaatagttttagaggaaaaagttccacatatttgcatttcattcccattcatttctcagcagagacaaaaacatatcttaaatcaacagatgttttactgtagaaagtagagatcaatttcattttattgtaaggaatagcagatcaatttaaaaacatctttctctaaacatatttccctgaactccaacctatttaaaaatggggaagattaatttgaatcctccacaatccaccagcacactccaagactttcctgaaatcttcaagaaaagctatgaattactagcaggttaaaaataaatttaagagcagctgaaattacaatggcttggagacaatgttgcctgtgcaagaaaaactaccaagtcaagtttctggaaagggggcaaagagtttgcaatttgtcacaaatttaggactaagcaattgatacaaaaactagtaatcattgttcaagtctcttgtgcatggccttaccacaattcttctttctttttaaatatagatacacttacaagttagaagtcaaaactggaggtggcagcagtgctagtgatgattacattgttcaaacacctatgtcaacaccagaagaaatctatcctccatataatatcacagtaattgggccttattctatatttgtagcttggataccaccaggtaaaaaaaaaaaagaagtatgtgtgtgtgtgtgtaaacattttaaaggaattaattagagataagaatagaactgttaatttagtaaatcagaaagacatagtcggtctcctggataaatatgaacagaaaaatctaaaccacacttctaagtgtatagacgcatgagtacatacatacatacgtagagatataggtatctagatgtcgatgtagatatgtaagtatatacagctttctatgaaagcaacactttcaagtacaagagactaaaaatctttttactcatctattttttttttttttttgagacggagtttcactcttgttgcccaggctggggtgcaatggcgcaatctcagctcaccacaacctccgactcctgggttcaaacaaatctcctgcctcaggctcctgagtagctgggattacaagcatatgccaccatgcccggctaattttgtattgtttttagtagagacagtgtttctccatgttggtcaggctggtctcgaactccagacctcaggtaattcacccgcctcagcctcccaaagtgctgggattacaggcatgagccaccacgcccggcttactcttctatatatccaatgcaagtcatataggtcagaattaccttgaacattcatttccatgggactccttagattggatcattgacattataccattccttttatattaaatcagtgaatggggagtttggaaagacagttgttcacttcacccatgtaccttgggttgtgaccacttatggtagctgcatttttcctctgtaagctgaatagccttcattgagccatttagtcattattgggttgccttgtgacttagtgcaacattatattttgaggtaagcaccatcctcaggtaaaatcctgactgcattaatactgtggagtaaagagtagagtgagaaaggacatatggaggacttttctttccaagtaaaatttaaaaatggttaagatgttaaaaacacttcaaaattatgtgactttatttttaatatctagtcttaagatgaaattgtgacacgccctttttgtcgccatcagaataagtttagccacagttcaaagtggcaccaaatggttaacagccatttgagccatcggtagatccattccataacataattaacataagcctatttttattgaattgaacagtcaaaacaggtactattgtatagctataaagagagcgtaaagacctaatacataaaacttaagtttcttatagaccaacaccttctgctataatctaagatcaaagagaaaaagttattttcccctaaaattcaaaagaaagtttacaaagagctttataagcaaagaaaaatataagttgctctaagatattaaatgtacatgatttcacccacttttgtttaaaataaatgtgcagcatattaaacaaaatataaaggaataattagtagtggcagaatgcatcacaaagtgctataatctttatgttgtaagagcatagatattcttgaactctgttcttaatttcgatagaggaaaagacatatcttctgctgtgggaaatatataaatttacagccccctttacagaatttatttctacttttgtttaattttatttatttatttatttatttatttgtttgtttgtttgtttgtttattttgagaccgggtctctctctctgtcacccaggctggagtgcagtggtgcaatctcagctcacagcaacctccgcctcccaggttcaagcctcagcctccaaagtagctgggactacaggcacacaccaccatgcctggctaatttttgtatttttagtagaaatggggcttcaccatgctggccaggctcgtctcgaactcctgacttcatgatccgcccaccttggcctcccaaagtgctgggattacgggcatgagccactgcacctggccacgattttttagtatatttctccttggcatttttattgtgctgttgtgtttttgcaccacaaaataaaatgaagctggatagagccaatctaataccatatttagcctattgacaagaaagttttagatttagaccagggtcttctacaatccaaattctccaagagcaatacgggaaatttcagggtgatgagcaaggttgatgatttctttgccatatgactgggaagtcccatggtttatcaaaatatctgttattttaacattatttaacatatcagttgccattgctaatctgaagacttcatgttcagtacgaatttgaaaatatctttattttatgactatgcaagtaagagaaatgaaaaagcctggattcatatcccaatactgccacctattagctgaacttaaacggtctctaggcctcaattttctccatctgtgaagtggagataatgatgatacctacatgtaggcaggtagggttgctgtaaagatcaaatgaagtaatttatatgataaatatattatctagttctatataatattctatagataccaatggtgattgtttgaagaattatttttttatctttaattgctcatttttaaaacgtatttgttccaacatttgctgggtctcaaagccccaattttcaaaataataaaaccacctactgaggattggattagtaaattttcaagacctctttcaaatttcccagcgtgtcatttttttctttgaattcaatatcacacttaaatgtttaatgtatcatgtttccatttagaaatgtatcattgtggaataaaacacaactttcacttgtttaatatgaccttaactctcacatacctcaggctttgtataaattgttcattctggtccagcctaggggatattgtagaatgctttacacactaactctgaccatttaaccaatggttaataaatctataatattcagacctgtcaatcttatagtttaagatgcacagaatccatttcagaaaccatataatataaggaaagattaaaatcttcaattaaatctttttcctggtgtctagaaggatttcaaactcagtaaacagtcagatgattttgacttgtgtataatctacagttgattttattggaaagtacctcatgctgtgttttgatttggataataaaaacatgtttctattcctgaatagtcacaaatatatatattttaaacagaaagaaaataaatttgtaagtggagattgtttatttgctcacaatataaagagttttctaggtattcatcatactccctgccattacaaaatgactacatcacagacagagctgaataatgggcaaaacagtccatgcctgcagttcccaaacctgaatgagcattagaatcacctaggaagcttgtgtaaagacagattctcaaccccaaatttactgaataagaatctcctgggatggagtcaagaaatctagagctttttaaaaactccacatatgactttgatgtgctaccaagtgtttttgaaatagtagcccagaggaccaaggaacagatctaggtattgctgaaaccaaatgattctgggagaacaatgtttgactgggtgtgtagtggcgtgccaagactagaagagttaattgtggaaaatggcaagccgctgaagggaaaacagccacgtgacagcaatgatctctgcagcatgaagaaactagtaactagaaagctttacctacccatccaaaaatctaaaaggaatagatgtgatttaccaaaaacatggatcacactcaccaagtgagactggtgaattacaataactgttttctctgaaaacatgagtccgccagtttctcttgaatgtctaaagcaagcttatccaacctaaagcccaggatggctttgaatgccacccaacataaattcaaaaactttcttgggatctttgcaattatttgttttagctcatcagctattgttagtgttagtgtgttttatatgtggcccaagacaattaatcttctttcattgtggcccagggaagccaaaagattggacactcatggtctaaagccaaaatactggctaaattgtatttgtttttttaaatatgcatttttttttttgtggtcagtgtgaacagagtaaccttagacaggtaagctgctgggaaaaaaaatgtctatgtggttacttggcaactgaaaaattacctaagcaattaactgaattttcagttttcaaactattgttctaatgctataaataaactaagccttagtacatgtttataagtcctactagtgaaagggtaaggtctagggaatagtgacaatacccaggggaagagtacccgtgatactgataacaaatgtcgtgtacatacgttcatattacttggtgtatttgccatttgttaaattcctactatatgccaaacactgataagctccttctctgccttacctcagttaatttttatgcaaacgctagaagacaggtaataatatcattatccccatcttaagataagaaattcgaatctcaaaaaagtaatataatatgctcaaggtcacactgcagagccaggattcaaattcaggtctactgtctgctactgccttttaagaccagttcctttctgtctttggcttaacccttaaatccaaatcgacttttcatttcttgaccaaagtctctcagatttatgatggatcaactatgatgtttgaaatagtagcccagagggccaagaaacagagctgggtgttggtgaaaaccaaatgattctgggagaatatttttttttaattttttttcttttattatactttaagttttagggtacatgtgcacaacgtgcaggtttgttacatatgtatacatgtgccatgttggtgtgctgcacccattaactcgtcatttaacattaggtatatctcctaatgctatccctcccctctcccccaaccccacaacaggccccggtatgtgatgttccccttcctgtgtccatgtgttctcattgttcaattcccacctatgagtgagaacatgtggtgtttggttttttgtccttgtgatagtttgccgagaatgatggtttccaccttcatctgtgtccccacaaaggacatgaactcatcattttttatggctgcatagtattccatggtgtatatgtgccacattttcttaatcctgtctatcattgttggacatttgggttggttccaagtctttgctattgtgaatagtgccgcaataaacatacatgtgcgtgtgtctttatagcagcatgatttataatcctttgggtatatacccagtaatgggatggctgggtcaaatggtatttctagttcaagatccctgaggaatcgccacactgacttccacaatggttgaactagtttacagtcccaccaacagtgtaaaagtgttcctatttctccacatcctctccagcacctgttgtttcctgactttttaatgattgccattctaactggtgtgagatggtatctcattgtggttttgacttgcatttctctgatggccagtgatggtgagcattttttcatgtgtcttttggctgcataaatgtcttcttttgagaagtgtctgttcatatccttctcccactttttgatggggctgtttgtttttttcttgtaaatttgtttgagttcattgtagattctagatattagccctttgtcagatgagtagaatgcaaaaattttcttccattctgtaggttgcctgttcactctgatggtagtttcttttgcagtgcagaagctctttagtttaattagatcccatttgtcaattttacctaggcaataccattcaggacataggtatgggcaaggacttcatgtctaaaacaccaaaagcaatgggagaataatattttactgggggcatcaaaaccagaagaattatttgtggaagtggtgagcccctgaagggaaaatatccacattgcaacaatgactttttgcagcgtgaaggaagtagtaaccagaaagctttacctacacattctagaaggaatagacgtgacttaaaaccagattccaggtgtaggaagattttagttaggtgggaggggaggagagtcacttctcaaattgctgtaaagagatcatccaaattctattttaaagccttggtaaatattcccctgtctcccatgtaaaccttcatccactttaccttattctttcttgataaatgtcagtagtaacattaccaaaacactctaagctctagaaaatcaagatctctagccttttgtgtatcatttgaacctctaaatcaggtgacatacaaacaacatatccttataaaaattttgctgaattaatggaggaacacaatggtgagcgagcctccacaatttattatgcagtcaaatgtaaattgtggatatcctgccatttaaaattactcaaacatttgattttctcttaaagtcatccttcgtctacattaacttaatcttaaacagagacatacacacaaagagagagagaggcagagagacagagagagagagacatttcttctttaatgacaaacagagcacatacacatattttccaaagactgcatcttgtcttatggatgtgcaattttttcacctttcagaaaaggtggtattgttttctaacatggaatgggcttcactatttagttgtcctctggccttgggcaagctgcacaatgtttctcaaattcaggtttctcatctgtacaaggagaaattaaatgcctaccttatattgttatatgaagtaaatgagatggcatggtaaaactccattattgtttgaacctttaggtaatgtaaacaaccttagattattcctaagcattccctctcaccttttaccagctctcaacattgggtcaggacttttgtattcatattaaagagaacatttatattaaagagagcaaaggatatatgttaccttaataggtgaaaaattatggaaaattaaatagcaaatgcttcatggaacataagtggtttactcagaatgacaatggagatagatatccctgctgtttaagaatctaaacattcaaaattatttaaactctgaaggtaataatgagtctttctaatttatcgagatgatgactatattttgaactgttctagcccttaatcatgttctaattaacaatgccattgcatttaacacatactttttctcactaaggatggtgagtcatttaggtttaacgtacaatatagaaatactggtgcttttcctttaacattaatatcttactccattaaagaaggaattagcaagaattctactgataaataatttttattaatattgctctagaaatacaaatttttttatttatcattttgattaaaggttagctggccataatatggtctatttatggacattagacatcttggcattcagttaactcatcagctgcagtgtattatttcagatactatgcatttaaagtcaaaatttacattaatctttctaaaggattcacattacattaattgggatgattcaacattgacagttgtttcacttttcttaacttataaatgcaataaccaaatgacaaggagtggtgagtttcagaagaaaatgtgaaactcacttcagtggtttgtattttattttggatattttaaaatgtatctttcattactgagctttaatatatgctaggcattttgctaagagattaacatatatctcatttagtgttcataataacttaatatagtatgtcctattgttttgctcattttactaatgaaaaaggtcaatttagacactccaagctattttctctaggttattcttcaagcaggtgtcagagcagggctgaccctcatgggtgtgagtccaagtctgactcaaaactactattctatattttctcaatatttttccacctaaacgtgcggaaagcaaatgatttttcatgagttctactgtaatcccatttaaaagctaaaaaactgatttttgctttatatataggaagtatgaatgaggacaatgtaattcaggatcagtcgacccagtaacccaatagaataattttatttgtggctcaaaacttcatgagatgtaattcatttgcctttgggtatattgattcctctagtcatttaactaacgtggaaattatttctgagccccactcaggggcaaaacatgatgctggacaccctaaaagttacaaagaggaatgagacactgtccctcttgtcaggaaccctaccatctagtaaggtagaaaagacataaatgataactattatacaaccaatgttaaatttccatacaattggtatgaatgagttcaagagggtcccgttttacttctgttcccccaaaaaggcctaatcaaggtttccctacctatacagtggagaatttagctcgatttgttaaaagcaccatgttaagtgcaaccaagtgttttgaaacaaatgcctctatcaaaccgaattaatagtttttcctcttagaatttttcctgttccagctcctaaaaaaagacttaaaaaggattattgattgacttgtcccattgtaaagtatgcacctgctgtgaaatgaagccatggagaaaaatagttgaataatttaacttttttatttgtaaagataatcagggtttttctgattacatcttaacttcataaatgttaaataacctatcagcatctagttgttgtaaattatgaaaaggagcattgcaaggaatattaaccaacgaaatccttgttctttagtgaacaagaaaatgtgttatggcagcttgtcattgtgcgactggtaactttgacaccaaataacaaaactgccatttgcacttagggtaaattggttcacttgagcttccactgctcctcttgctctgacataaatttatgaactcaggaactaaccaagtcgtgtggcttcccagctgactttaacaaatatgcccatttcatttcatttagtcatcagaataccagggggctcagtcatttcagactcattgcagatggtatagggtttgtaggaacaccagagactttcgtgtcacagtcctggaaattatgatagtggagggggcccactttcctaaatgcatgccagtgttttacgtgttcacagcttagaggagcattttctgtttcagcacctcataggtatatgtaaaggacatttatttccaattaatgaagaggtgaaaaatacattttctatgctcatggtttggctagccatgtttaaatctggattaagattatgtttatatttgacatgcggtagaagcacagttttgttccttcatcctctgggagtcctgtcctttttataacagaagttacttcttgaaggatgcaaggcctggaagcagaacagtaggtacagactgaagacataaagtaaaacaacctcagatgaattggagggaacgccactccaaattactgctaacaatgaataatacagtattttcgtaggaatgcaatttgatcatatccaagtacacataaaaaataaaactagataacaaaatagtgttacaaagacattaacttgaatgaatgtaacatttatttgtagttggaatagcaactttatatgaaagatggattcaaaagtgtttgagggcacatggaaacagtgccatagttgttttttgttctttatttcattttgttccattttgtcttgtagagatgtcagccatttattaagtactttctatgttatgggaatatattgaaaggcttacagatattttctaatttaatcctcacaactctctatgaggtagctattagtatcatcattttacacatgaagagacaacatccatagaggttagttaatttgccagtggtcgcttgggaaataagggcagcagaaggatttgatctatctgacaccactctgtggtttgtctagttcaacaagaatgatggcatgtttcttatgaatgtgtgtctgtcaaacttttctgcaagaactgtcctaggaacaaagaagacaggatgaatatgcaatcccaggaggtctgaaaacagagcctgaagcaatcatcattagcttgcagtttctttaaggtcttgctttttatcttaaaaattcatgtaaatttgccattgtattccagtgtttgtcttcatccaaaaaataatatattatacaacttatcatttgggaaaacattttctactaatctcattggctaaagagtgataatgctgttatatttcatgatattaggaagatctaaagaaaactaagcccaataacaggttcaaggtcccggcaattcttcccctcttcattttgtcataaatatgtgggttcaccgtgaggcagaggttgcagtgaaccaagatcatgccactgcactccagcctggtggcaaagcaagacttcgtctcaaaaacaaaacaaaacttgggaggccgaggcgggtggatcatgaggtcaggagatccagaccatcctggctaacaaggtgaaaccccgtctctactaaaaatacaaaaaattagccgggcgcggtggcgggcgcctgtagtcccagctactcgggaggctgaggcaggagaatggcgtgaacccgggaggcggagcttgcagtgagccgagattgcgccactgcagtccgcagtccggcctgggcgacagagcgagactccgtctcaaaaaaaaaaaccaaacaaacaaacaaacaaaaaaaaacaaaaaacctgtggcttcaaacaacagccttttattcctcactgctttactgttatggcagggtaacaatagggagaaatgcccaaaatgtgatatggaatgctttgtcattctaggatactctggatggaaatttctatcagcatatcctcctgctgaaggtcaaattgcaaactgagagggtccccgattccttcttcaatctctcttaccacctcaagcaacaccctccaaaaaatactttttgcggagaggaagaagaaacctgattatattactttttattttacctctggcacagtacttaaatttttctcatccattaatgaactgagtctcaaatggtctctataatcaattctccttatccagctctcaaatttcattttaattattgcagtcttgttgagagcagtaaaaactgccagttttgtcgtggagtggtgaattaggcctcgaagaatagcctttaaataggcctattatgtgtattcaccataccagtaaagagaaaaataaagttattttttaggcatttaatttttgttatgatatcttttcctgtttctttatggagaaaaatagtatagaactctttattacctgaaacaaagtggaagtgtcatgggtcaggccaacttttcatcccatgtctagggtagaaaatccacattgagttcactttaaagcaatagcgagagactaacattacattgtcctttggttacagtatgaacagttatacttgttcagcacactggcacatcagcataaacattttcttgtgtcctacagttggttcattctgtggtgactacagagtcttcaactctacaattggctagcaaaaattctaatcactcaccatacatacaattctctaatcttgaacttttagaaagaaaaattcacacccaatttttgtgaacaaagaaacggggattctgctggttccccttcctcaaacagggaaatcctgtgtttcccaaattttccatatcaaagtgatactccaaaaaaaggcacagtaagtccttaaggtcatgataggttcttggaaactgcaattttgagtcaaaagatatataaggaaaccaattttaccttaggctagttgatataagcaagatttaagttgcaaggaatatttgtggtcacaaaaacgtcaccaaactaaatatcatcaaagaaagaccaaaacacttctaatattaaactgaaataaatatgagctatacatacatttaagaaagattaatagaaacaagtaagatcatttttaacctaagttttggcaagtcagcgagtgacaacagccatagggataaatgtttttgagcagaaattagaagaaattcttcttaccaccatgcactagtaaaaacaatcgcaagtagggcaagctcacagaaggcttttgtacagcattatttattattatgcatctatatgatagtaacacacttaatgaatctttactttacaattattcattcattcattcattttctgacacaccttttccagttcagggttggggtggccagggcctaaccaggcagctcaagaccattccgttacagggcacacacacacacccacactcgctcagactaggaccattcagacacaccaattaatttaatggaaacatctttaggatatgggaaaaatccagagtacccataaagaaaccacgcagacatggggagaatgtgtaaatttcacatagacagtggctccagctgggaatcaatttttttcctcataaatattaatgaaacaatgttgaatgaaacaacattattcgaggacctacggtactatgtttgttcctgtctttgaatatactttgacatgagcccacaaacctccaaagcaggtgtatttcaggttgggatacttggtctgcagaactttaaatttctacctataatatgcttgttccatcagtaatgatttttacttatccatcatttgtttccttgcttcggaatagtctccaagaatggctctgccttactgcacaaattttctcaaacctatcttgtcatttttccccaagttgtcctactctaagactccattatcaaggaaaagcataagtatattgatataagtgttgatatcagatgggcctaagttcaagtccttgcttctccaattaatcagtgtgcaatctggaacaagttatttaacttctctgagttttagttttctcatcttaaaaaatagtaatatttaccatgcagtattgtcttgagggttcgttcattcattcaatcagctaacatttattgagctgctactttgtgctaaagtctaggcagtggaaccacattggagaaaacaaagtcctaatttatacggttgacattctagtagtattaaatgggataatgcgtgttgcctggcataacacagggatgcattgaaatgactcttgtttgtactacttctgcaaacattgtaagactttcaaactggtttccctatgtcttgtctctcatgtttttaagccactattcatttcccaacagtgttatcattctaaaatataggtagactcttattttcttatttatacctgcaaagtctccttgttgctgattatatatgaagcccaaatttctcaaagaattaattgataaaatttagtagtcacttgagttttggagtgaagaaggcaggatccactctaaaagtcttactctaagatttccatcctaggaaaatgggaagatggtattatgacttactgaaagaggaaacctaggaaaaagaacaggtttgggagtggaaaatacagctagttctgttttagaattgttgagatcgtggcctctgaggaatatccatgtagaaatacctagcaggctgttgaaaatacaaagctgtaataccggaaagatagaaagctagagataagagtttaggaatcaatgatagaatgttagtagtttaacctactagaataaatgtaccagatagtttagccatgatgctctaaatttaaaataaacattctcagtctaagctgccaaatttaacgcaatctagcacctttcctgaggaagcaattgatcagtacttctgaagatgatcaatatctccttcagacacctctttttcatctatcctacacaaaatcctgagcatctttggtttgtaccagctcttccactctgtaaatacagaggccacatctataaaaagcaaaaccacatttcattctttagacctcatctctcttaggtcattgagtcctgtgcttcctcagtaatgttatctctagattccactgtttctaaagtaaagatagacttatgtgggtactacagaagtaaataactaaactcataaatgttaaaaactctcagatcaaggagacaatgtaatagaaaatgccattatattcttcattcaaaactcatatcctctccttgaaaaagtatgcctgttgttcatgaccaaataaaacttaacaagcatttaattatataaatagactttgacgaggctaaactgacaagacctactttctttaggaaggaatggtgaaaaatgacaattgttgaacccaaattttcgctgtatttagggccataagtctcactgacagtgaactgtcctggcccaataattaatgcactgggaattctctaggtagaccatgatttggatatttcatgggctatgtcaaggatccatgtcagacaggaggcatacacaatgctctacagaaaaattattgtcacaagcaaaattggtgttgttttctatgaactttaaaagtaagtaaacctagaaaaaatataggacagcataattgccttatatgttttaagtgaaatgtgccttcatttttatttgccaatagagtatatctttaaatagaaatattatgcttttaaaaatagattatgtacatttcttacttttggaatacacaatctaatatttgccaacttaacttttgtgaagcttttaattgctatattaaaaagtaatttacttttctattacaactttttttttttttttggaggcggagtctcactctgtcgcccaggctggagtgcagtggcgtgatctcagctcactgcaacctctgcctcccgggttcaagcgattctcctgcctcagcctcccgagtagctgggattacaggcacacaccactatgcccggctaatttctgtatttttacagggtttcaccatgttggccaggatggtctccatctcctgaccttgtgatcagcccacctcaacctcccaaagtgctgggattacaggcatgagccaccacgcccggcctcaattacaaaattttaaatagacattatttttaaaagacaaacatttgttgcccattctgttttatttatatatatatgtgtgtctatatatatttatttatatatatatgtgtgtctatatatatatacacacacacacacacacacacacacacacatatatatatatatatgtttttaatgttctctctctctctctctctttaaagggatcctcatccccgaaattcctgtggagtacaatgtcttactcaatgatggaagtgtaacacctctggccttctccgttggtcatcatcaatccacccttctggaaaatttgactccattcacacagtatgagataaggatacaagcatgtcaaaatggtgaaagtctttcagacacttggcctgggcttttatgaaaaagtatttcattaaaaaatttcattaaaaaggaatacattctcagtccaaatataaagactaacgtttcacttcttatttgtagtggactgtttacccagaaaaatcacagtctggcatcgagtaaagcattatgcatttctgcacattaaatcataaatatttaaatatattaaaatggtggttttgcaaagtcttgttttataaggccctttgaaagaaaaacacctagctcacataaaggagtctttggtaatataaaacaaaaatgagtattccaaatatttcatagaaaacatatttaccttggccttatttaaattttatccaggaggaggaagtgagaagttatttaagagttgaattacacccaaatgaatcctatatattttatagtgcttccttgaaccctattcatatatacaaactatcaccttgtgtttcatggcttaggctgtggtcagtgaaattttcatgtatctgtgttgtgttaaggaaaagcctcccccatttcctttatcactccaaacggataagtagctaaatgtaaactgtgatttaggaggggagaacagggaatcaagagagctatacatcattttatttatctcttttaaattaagtataaactttaacagatatggatatgttatatatgtgtatatcatatataacatgatatatgtgtatatcatatataacatatgatatatatgatctcatcatatatgttatataacgtataatactcatttgctaaataaagaaaacatgtaacttaccttagtataaaaaacattttgcttcaccttaaagaaatttatcagactcaatgtgtagtggaaactcctgtattgaatgtccttaggaatttctgtttccaaatagtgctagttctcatggagttggttagaattatgagtctgcaattttgctctgctgaactcatcagaaatggctagtcagtttgtccttttttctctaaaaaatagaccatggcatttttgtttgaggggtattgctttctctgatctgtcttcacctgataaacgtgaaaataattttaaattaatgttttcttgactcaagtacaaagtcaacgtctgcatctccgtgtccctgaaactgtgcaatggaggtacaatatccttcaaatagattgttttattcctgtgtgtttgaataatgttcatgagtttaaaatattggcaaaataaaatattattaaaagcatgcaagatgtgtaggtcacacatacacttgtgaaattcaagtgcattatcactttctggttagaatgactataataaactagagaaacttgagttcagacaagtttccttattattccttatttccagacaatatgccttattgtttatgtctatataaatatgtgactaattaatgggttttccaaaaataattttctatttaaatgttcaaatcccataaaaatttatttaaaacacatgtacaagtatatatgcaaaaggacaggttaaaataattttcatgatatcattacccttctgtatgaatatgtagttcttttccttgcttgaaaaataataaagacctcaattttttttttttcaaggaagttgtggagttagcagtaggatgtttgtcaaaacacctgaagcagccccaatggatcttaattctcctgttcttaaggcactggggtcagcttgcatagagattaagtggatgccacctgaaaaaccaaatggaatcatcatcaactactttatttacaggtaagattggctgttactattatttttagttatttaagaatgcgtactgctccaacacagcagaatcaagagcattttatatttccataagagaatgaatgggaattcatgttgtgtttttttttgttttgttttgtatgtttgtttgtttgtttgtagcacctaccagtgaggactaagactggtgctcaaacttttacaaattaaccaaggaaaaaagccataactgccatataacatttttgattgagatctgtttgaaaactgagaccttatagcccacataggcttatatttagtgatggggcagaacagtcctctaaagcaggggttcctaacccccaggccacagagtccgcggcctgttaggaaccgggccacacagcaggtgagtggctggtgagcaagcattaccaccggagcttcacctcctgtcagattagtggtggcattagatactcacaggagtccaaaccctattgtgaactgcgcatgtgggggatctaggttgtgccttccttatcagaatctaatgcctgatgatctgaggtggaataatttcatcttgaaaccgtacaccctaactgcattgccccagtgtgtagaaaaattgtcttccacaaaaccagtccctggtgccaaaaagtttggggaccactgcttaagcagctcactgaccaagaaaacatagtctttccagagaggaaaccagatacaagacaagaattctaatatttctcattaattattatgtagagattaaaaagttttttctcctcctccaaagatggtgcttttcataagcagaaaaaggggctctcctctccagttttccttctgttttaatgagcctccactccactggttagatggtgttatagcaacttgttccatcatgtgcagaatttattaagtgtacctacctaaaataaagaaaagagacaatagggaagagaggaagagaaagattgaggaaaaagagagacaaagagagattgagagagagagagagaaaataatggaagagagagatacactatgaacattttggtttgaaggatattttgctctctgatctagtcttcaccagatcaacatgaacattgctttaaattaatgtattctttaaataaataatgaatgaggaggagaaggagcaggcaaaggaagagaatgagggagagatggagggagggagagaagaagagaaaaaatagagaaagtgaggggaggtgagtagaaagtacaatgcaaagagccaagggggcaaataacctgtcaactgatggcttgctacttaagacagaaaatacaatcattggtagacatacaggacttgcagattgaaaaacccaatcccattctgaaagcaatgtatttcctttagcgtacaaagcagaacacccttcttctcagatcctcataccccgcacctcttcaacatcctttgttagtgtctctagcagcctcaggccttcccttatttggtcctatgccctggaaacttagtgaaacttacttaggctcctcttataactttagatattgaaatcctttgattcacatcagtcttcagtgatgagctaagggcttatagaaaaaaattacgaaaggagaaagtattattgcatttctggttatgtaaatgacattaccaaaaatgaacaagccaaatttcttctcagcaaacattaatttgaagaataatatttctgattcaaaaacacatgaacacgtaaaaatggttaatgtgaatttccattttacgctaagcacattagtgcaggctctaaaatgtccaccctcttgaaatagttttctttcatccacttaatgctaattgcatgagaaaagcacatcaaattcctattcagaataaagggaaatagagtatctgttatagaccaggacgtggcttcactctgttggttttgtaaataaagctcgtgattacagtgcctattccatggcagctatagagagggaaaacaggaaatataatgcagaaagcccgcttcaatgaaaaatactgtaaattgaatttgacagcatttgatggcatctgattattctaatcacagccaaacaatgatataaagagtaatatgaaacagaatgtgttactgcctagcagactcaaaagcaataaaccttcctccaatgtgacacaatcacttcacaatcataattgtagcctgtttgatacctctgagtacagcagaagggcactgactgacatagatacattttgttttttatttaaagtgaaatgaaaatggcgcactggggctccagatacaatcgttatattcacctacataggcatgaatcacttggcagttatttcaactgaagtttaaatgtgcttagacaacaacaatatcaaatttttcttagatagctgcaaaaaataatcagaaatttgtaaggacagaaatagaatggagacacatagttctttttcattctgagactacatagagccctttatatagttatagccaccagcctgcagtatttctgaggaggttatggcatgtaatttcagcttcatcattggccttctctttcttctatcggcaccaaaggaagtacatttagctcaaaccaaagataggatttggcctatgcagatatttttattaacttgcaggaagcccacttgtaaatctcatttgaaattgtttgccactctcttctcaccaagaccctgaatcattttcttttctgtaactgtcctttattttttaaatatttcctctagatattatcctattaaaaaatatctgacctaataaagacagaagatgtttatgacttcaaaaacaaagcaaaataacctaaatattatcctattaaaaagcgtctgccctattaaagatagaagaatgtttataatttcaaaaacgaaacaaaataacctagtaagaacaaactattaatatgattccctctgcttagtttatctgtttaagctattttgttgactatatataagtcacaaaaaaagatttgctacaaaaagttttgtaaagaatagagaccaacatttaagttagtgttttgcaacctgtttattgactgagtatagacaagactgtcttggacatctgcttcctcctctcaatgagtttggctggtatgataatgattcttcagtattccccctttattttatatctgcaaccttgcaaatggcaaaaatctcatcacttacgtctacaaaatccatcaaacacattaaattgagactttacaaaacatgtaataaaataatctcctcccactaggtgctttaattttaatagaaaccaaatttcatggggtttattattctcatgagctttctctttaaataaataaaaagatttgatcaatgtgcactgagaggcaaaactatatacaaacaccctgtaaatgctgtaaaaatagaaacaaatgatggcacttccttctgagtatttagtaagatttaaaggataaaatctgaaataattttgaagactgtatgatatgaaagggttttcaaagcagataagtgaaaacattttataaaatggataattaagctgattgaattaactaagaaaagacgagcattgaatcaaaggcaaaggaattttgatgtaattcaatttgtattgggtggaaagatggatatagatatgaatatttatatagatagatacagacagaagacagacagacagacatctacctatccatacatgtacatatctactgagagagacacaaagatctatgagacctaagcccttttaccaatgatcttcactacagtgggagatataagacaggctaaataaacaaagaaaagagtaaaatatatagtggaaaaacagaaatatttaccagaaaatttagagaataattctgtgtctagaatattcatggaacacttcatcaagttgatgtcattgagactaggacttataaaataaagatttaatgactatttaaattgtaagagaaatacatttgttagaaaaaatgttttaacagtacagaagattactaaggttattattcattcttatgatttactcatggcatatgtaattttcactaatagaagtaacactattaattttaatatattaacattaatgttttctatttgtattttcttcttcatgaaagaattatattgcccatattgttctgcaattttctttgggcattttatatatatgcccacacacatatacacacctaatttcttttaatgactcatcaatattctgttatatggatgtgtatcatatattatttagccagtaccctgatgatggcaagataggtgattttcaagttttcgttaccacagcaattctctaataaatattcttacggtaagtatacagagaattattcttagtactagaagtactgggtcaattaaaattgttgaggatttgtctttactagaccatatgcatttaaaattgttgaggattcctaagttgtcttccaaatatcatatgtaagaatttctaattctgaaatcttttaatacagggtcagtcttccaaatctgtcagctcaatattttcatttgcacatttttgttgttttaattcaagttttgatgattataagtaagattgttcatttacttaaaatatttatcttctatttgggaggggtatgtataatatattataaattcttagactaattttttctactggattatttcttattgtctatattctttccacattaaagaaaatctccctttcatgatcatattaaaaataacacattaattatttcttccagcacttttatggctctactccttatttctaaatatggaattaatattgttattggaaattagataagaattcattttcttaaaaaatgctaactagtttatcaacattatttcataatccactgatttgaaatgtcactcatacaaaattcctatgtgcatcgggttcattttaggactttgtattctgtttcacttgtggtaaatagggattttaacaagtacagcctgatggtgaagacatgataagtgaataaaatcaatagaataagcaaaatttccaacacataagcataggattcaaggaatggtcaggtttatctggagtcattgctattagtaggggacatttagaagatcagcttaatgatagattttagatctaaggagtttaggctttatattcagaggcaatgtgagctgctgaaggtttagggggtaaatagagaagcaatgtaataaagtggaaagagtgtggcatttgtagtcagaagatatggcttccagggcctggctctaacacttactagttatatgaccttaggcaagtcactgtgttccctaattttccatttttacatgaagtgaagatagtaaatataaaagataattagcctcttggaattctgtaagaattaaataatatgtgtggaattactgttaaatgtgaagcatgataaaaatagaaagttatcctagatatgttgtccaaagccatgttttagaaagacaaatccatctggcagttatagatgtacatttaaagtcaatgaaagaggttcatggttataaaagtagcagcttgcataacagtatgcctggtaggattctgttttcctttaaatatatagtatattttttacatatatatgtatataaaaaaatgtctggaatgttaaacaccaaaatagtgctagcagtgcttatctccaaatattaggctatcagtgattcttttaaatacttctgcttttgttcatctgtgttttcttattaatttttatagtcaatacatcatatggtctagtaaagacaaaataataaatttgtgagcccagatgcaaatctatcatcactgtctccgattttcctatttccttctttgtgtgaatatcaccatcactttctgtaataatcaaagtctgatcaagaaagaggaaccacactacttactttaacagaaggaatttaatataaataattagtaagtagttataaatttgttaactaggtaactaaaagcataaaaagagaactctaagatatcatggaggtggcaactacaggaaacagctagcacctttagaactgagggaacaaaggggagttgttagaattattaaaatgtaaatgcatagaggagggtgcctgtgaagctgggactcagacagttgaagaggggtacctgccactggtgcagttgtatggaggaggaaacatgaaattaagttggttttccaaatgtcggaaaaattgcatgctgcaatcacttgctcccaaggtatttctttattgcaacacaagaacagcctaatacagaaaactggcaccaggagtagcgtgttgctatgaagatacctgaaaatgtggaagtgactttggaaatgggtaacgggcagaggttgaaagagttgggagggctcagaagaagacaggaaggtgagggaaaatttggaacttcttagagactggttaaatggttctcaccaaaatgctgatagaaatatggacagtgaagaccagactaatgaagttggagatgcaaataattgagaactagagtaaaggtcacccttgttatgccctagcaaagaactaggttccattacatccatgccccagggatttgtgaaagtgagaacttaagagtaaaaacctagggtactggtggaagaaatttcaaagcaacaaagcagcattcaagactttgcctggctgtttctaacagcctacaatcagatatgggagcaaaggaatgactcaaagttggaacttttatgtaaaagggaagcagagagcaaaagttcagaaaatttgcagcctggccctgtggtagagagagaattcaagcagactgtggagtgaccactttcaagagagactagcatcactgtaaggtagccaagtgttaatatccaagataatagggaaaaggcctagaaggcatttcagagatcttacaggcagcccctctcaacacaagcccagaggcctaggaggaaagaatggttttgagggccaggcccagagccctgctgccctgtgcaggcttgcgaactgttccccacatcctgactactcttgctgcagctgcagctcgaagggcctcagatacatcacaggtaggtgcttcagggggcgtacaccaaacccttggtagctaccatgtagtgttaagttggcagatgcacagaatgcaagcatgaaggaggcttggcagcttccccctagatttcagagaatgtatgagaaagcctgggtgcccaggcagaaggctgccacaggggtgaagcccttacagagaaactctactagggcagtgcagaaggcaagtgtggtgttggagccaccatacagagtctccatcagggcgctgtctgttggagctgtgggaagggggccacttctctctaggtcccagaaaccatggacagcttgtatcctgaaaaaagccatagggattcaactccaatatatgagagcagccacagggtctgcactctgcaaaaccacagggttgaagctacccaaagccttaggagtcagtgcttgcagcagtgtgccctggagtgggacatggagttaatggagactattttggagctttaaggtttaatgtctgtcctaccaggtctcagacttgtgtgggccctataggccctttctgttagccaatttctcccttttgcaatgagaatgtttacccaatacctatatccacattgtatcttggaagtaaataacttgttttgattttataggcttataggtgaaaggagatgagtctccagatgagattttagacttggtacttgagacttggggcttttgagttaatgctgtaatcagttaaaacttcggggaactattgggaggacatgatttcattttgaaatgtgagaaagagatgagatttgggaggccagtggtggaataatatagtttgtatgtttgtcctctctaaatctcatgctaaaaacagattcccaatgttgcagatggggcctagtgggaggtgattgcataatggggtcagatcccttatgaatggtgtagcaccatgcccttagtgataagtgtgttcttgctcagtttgttcatgatgggagatctggttgtttaaatgtctaggactccacccgccccccgcccccccgccacctctctctcttgctcctgctctctgcacgtgatgcacttgctctttcttcaccttccatcatagttgtaagcttcctgagtctctcataagcagatgccagcatcatgctttctgtacgccctgcaggactgtgagccagttaaatccctattctgtataaattagcttacctcaagtatttttgtagcaatgcaaaaggagcctaatacaaattagaaaaaagaggtagcacatagaaggatatgataactcttatttgagagaaaagcaaggaaaagactttctggaaaaagtgatatggggctagaattttaaaagacgagttgtagttagtctatagaaaaaaggagaggccaggtgtggtggctcacacctgtaatcccagcactttgggaggctgaagagggcagatcacaaggtcaggagatcgagaccatcctggctaacacagtgaaaccccgtctctattaaaaatacaaaaaattagccaggcatggtggcaggcacctgtagtcccagccactcgggaggctgaggcaggagaatggcgtgaacctgggaggcggagcttgcagtgagccgagattgccccactgcactccagcctgggcaacagagcaaaaaaaaaaaaaaaaaaaaaaaaaaaagaaagaaaaaaggagaataagaaagaggattgggagggatattgccagagaattagcagataccaaagccatggaaccgtgaaatataatggaatataagaaactatagtcaagcatttgatgataactagaatataaaatgggactagaaatttcagaaaggtgagtccttttgagaatcagcagattaaggataagcataggccattttacatggtaaatctctaaagaatttttaaaaggactgtcttaaaatttttgaaaggtttgtgatgtctcttccctcaacagccaagtctctactcacaccaaaaacttgacgattcaaccttcacaaatcattttgtaaatcacctgtgtttccatttgtcctctcagcaatctagttcagggtctgcatttattcttacgtaaactgttgagatgacctccttgttcaatgccagatgcacatcatctccatgataacttcattcagatcatgcattacattttacccaatgatttttatgttttaatttttataagaattttcagaggtttgttatactctatgaggttattaactccactttacaaaatgaaatagaaactagaggacacagacaggcaagttcacccaaggtcattgaactaagtggcagagccaggacctccaacctatctcctctgactacagatgtttctgattatctatttaaactcagaatatttgtaatattcttcatggaatggggttggcagtttcataacctcaaaattgttatggtgcattgggttctaggattttgttttaattgcttttgaaaataagcagtgacaattgctggaggggagagaaggagtaaggagctcctaaaagcattgtacattgagaccacagaagtgtgactgcctttaaaaatatatggttcctagtttttatacttatttttgttttcctcttagtgttaggcaacattaaattaactctagttggaaaattacattcctgaagtatctcccaaatgagcctgagcaaagaataaccatttggctattcagagagaactgaaaatgtgatttctctaaacacaggctactcaggaggaaacacttccagttaaatgaacaggtgatgcttaaatcttaaataattaggaataattgtggtctactcaaccacttctgctctaaatgtattcagacataaagagagactctgttttttagcagtgcagatgggacatgtacttctccacgatattaatttttcaaggattcaatagcgataagaaatacttaaccaggctgcaccttttaattcttttggtgaataaacttgaggccaacataatactcaatcttttaaatagtatatgtatttaaaaccccacttttaggcaaattttgttaagaatgtcggctttatagaaaccatgactacatctcaatttgggaattcgtgagagtttaataaaaattaattgaattgtcatggaaaggctgaagctagacaaaatagaaaatgttacttccccatagaccatcataggtttgtttgctgtattgtgttcctagcaaacaactttttaaaaatcactgagaagagtccttggctatgagccctgcagttctcattagaatggatctctcccaatgacacacctggtacctgatatctgtagcaagtacaaaggccaaaccctgcaaaccttcactgagtgcagaatctggttcacgcatggtagtgagcaataatgaggtgggctgccgaaccataattgcaggtgactgagaggtgtctatgaagcctctatagcttccagcatgaagcttgtcattgctcatacttaggtcatcgtgatttatcaacttaaggatcatcagattcccaaagccaaagattttacatattctgcctttttgtgaaaggtaactgtcattcactttgtcttaataaccctttacattttgatggagctggttaatctgatatggcagcatgtgaatttttcagcatctgaagagtgtgttaattaaatacttctaacagcctggaaaatattactgtattcatcactctcttctcaactagagagagagctgaaagaggagggtcaatgtcttggttacattctctcccaacctggaatactgccctgataggaaataagagctgatggagaagaggcaaagatgcagggaagtaatgggattccataacttttagcctttcacttgaaaaacatgattgaacacttactgggctcagatgctgggaatatagagatatgccaaccacagttcctccagaactttgctttccatcaaacctgcatcatgtttttacatctggatgagaaaagaactgttccaaatgaagtatcagatatatagggccgtctcaacaactcaccattccatttctcttacttctatatttaatgctatatatatttagtaccaaaagagtatgcatttggccctagtttccctatcaacaaaatctaaagatgagcctaaacaattccatcctcagacagttgaaagaattttggggtcatactctgcattttaccaggttttggggaagacatctaaaaggaatttgacttttgtcctttaaaaatctctaaagcaagccagacatggtggctcatgcctgtaatcccagcactttggaaggccaaggccagaggcttgcttggggaagaccagcctgggcaacatggcaagacctcatctctacaaaaaaattttaaaagttagccaggcctagtagcacacatctgtagtcctagctactcaggagactgaggcaggaggatttcttgagtccaggagtttgaggctgcagttagccatgattgcatcaatgcactccagcctgagtgacagagtgagacccagtctcaaaataaataaataaaacaaaaaaactctaaaacaaattcctattatattacttatcatgttattttcattaatctgcacatagctccatcttctctactcagctacctattcctttaggtaaggggtgtgttcatctttttacccttgtttctaatacaatgatgggcatataacagtgcttaataaagttgttgatgtataagtacaataaatgtagaaaaaacagtggtcttgatgtataagaaaagattgtccatactttgagaggttatggtttaaattatagaagagaaaattcaaatgaagagaaattaagtggcatctaagaagtgaatttaaaatactttgtaaacatcctgggaacaattgcaaaagagcattgtgctgcatgagagaaaataggaactgtggacttcccttcatagttcttcatcatccagtatgccaacctgggctttttcacacagtaattttatggtcctaagagcagcaaaaggatcatcctcaatgtgcaaacacttttgaagtctctgcaatcatcatatttgctactgtcccatgagccaaaaaagtcatatagccaagctcagagtgagtttacgagcatactcgcaaaaggcctggatacaggaagacaaacacattgggaccctagctgcaatccatttatcatagaagggtaaggattcccaataatagcttctactaattccatatcctgtggttccagttgtacaaaaaataaaaccccgatataactgcatgcatacatgcacacacacacagacacatacacacagatctggaaaatatataaaaatgcattaataatgtttaatatatgcttctgtatttttaaaagattttaaatatgtttgttttcttgtattgcatatgtatcttgttattcagcaaaaacatctggaagataataaaatgtgattttggatgaggtttcaccttttgtgctttttatatttcttctgtgttttccatgttttctacaaagcatatgcactcttttataatcagtcaaatacgtgtgtgtgtgtgtgtgtgtgtgtcaactacactttaaaaatgatatggagttaggccactggagtacttctccatctggtttttctttactatgacaccaggaagaaacagctgaaaagttaagttgataacaaattctaaaaaaaatgtttttactccatctacaaactttgttttgaagtgtgcagctgtcactggttgcctgcttggtttcctttcagacgccctgctggcattgaagaggagtctgttttatttgtctggtcagaaggagcccttgaatttatggatgaaggagacaccctgaggcctttcacactctacgaatatcgggtcagagcctgtaactccaagggttcagtggagagtctgtggtcattaacacaaactctggaagctccacctcaagattttccagctccttgggctcaagccacgagtgctcattcagttctgttgaattggacaaagccagaatctcccaatggcattatctcccattaccgtgtggtctaccaggagagacccgacgatcctacatttaacagccctaccgtgcatgctttcacagtgaaggtaagaccctttagaaaagtaacagacatgcagattatctggtgaatacgttgaaattaattttcttgtccaacttctcatttttcttcacttagggcttaaatatatgaaaatctttcacttgtgaaaagttgcaatgtagtcacggggataagatactgaactgagtatgaggagtattggagaccagtttgtagaccacgactaattttgattacctcaaaaccaataaataaattttatttattcataaaattgcctgatttccattttccatatttactaagtgggaatattttttttttgagacaggctctcattctgtcacccaaactggagtggagtggcgtggtctcagctcaccacagcttctgcctcctaggtttaagcaattctcctgcctcagcctcctgagtagctgggattacaggtgcccaccactgcccaactaatttttgtatttttaatagagaggggttttcaccatgttggccaggctagtctcgaactcctgacctcaagtgatctgcctgcctcagcctcccaaagttctgggattacaggcgtaagccactgcgcctggcctaaatggaaataatttagtcttgatttccattttccatgtctactaaatgggaataatgtaatgctttcctccatacctcatagagatgaggttcagatgaaattagacagaatatttaattttctacttccccaacaagctagtataatatatagctatatatatatgtatatgtatatatgtatgtgtatacatgtttgtgtatatatgtatttgtatatatgtgtgtatgtatgtgtgtgtatatatgtatttatgtatatatttaaatatacacacacacacatacacaaagttgcatacactatggcttactggtgatttttttcagggatggcttcctctggcccatagaacgacttaattcagttcacctgagcacttagtagctcctgagtgctttctttatgtccagcataacctcatggtctatggaatatacagaaacaggatggtccttgtcacagggagtgttccgttttataatattgcagagatgagaattgcacataaggggaaaagaatgagaagcagttgagtacagcctataatgtccactacactgagacttagatcccgaactccactatctactagctttaaaccacagtacaagagagagtaacatcatataccaagtgttaggcaagaaatgctctgggagatcaactctcaaactgaagatgcttcatggataagattaaattttgtggtcttgggagtgaaatacaaatatgtgccaagaccttattaaatatggaaaaccctcaataagaacaaataaacagacaaactaaagcatttataaaaaaaccaaaaaactatgtttctatgctttaaatcctggaaggccaatttacatgaaggttatcttatggaggataacatttatcaaaatatttaaattacagtgagcaaatatattttcattaaactccagaagagcccttttaaattaatagtttaaagtacaatgttttcccactgtcctcatgtttaattttctcatatgactaaaaaataagcaatatgtaaatgaaaggataattgttttatcttcatttttatctgtttcagaattagtactatatttttattagatagtaaattatgtactagagtcttttatattatgtcttctagttcctatatgataagcattagaagcagtgttcttaagtgtaaaagatactttttagtggatatgtgatccaggaggaagttcgttacttcccaccatatccttcaaactcatgttctaaactttcacccttaaagtaaaacgtttatgagtatactgaaacacccttgttaatagctttctgaatgaggcaccttaatttaaatatgtttttattgaaggcatcaggattataatgattaaacctctgatcttttaaaatacaactttcaggggtaggagcctaataatcatttagtctcacgaaacagttctattggaattcccttgtggaataaccctgtaagtcatcccttcataaccagcttcattttaaaacacaagatttaaagtatatgatgaatccatgaactctgttctttatttaatcttctaggctctatttttatcacactaaaaagcttctgaaaagaggcaagtgtatggccccaagctttaagcggcacagggctctttgcacatgggccctccctgatgtggctttcattttgacagtccagtactggtgtgcttttctatttttccaaagattttttttcttgcaatgtcgaatagattagccagaataattttaaaaacaatacttctgtgtcctatttttgaatgtgtatgtgtgtattcaaagtggcctcccaaaacctaaatctttggctcttagaatttcaagagaaggcttcattagatacaccaagaaaggtcccacctgatcttttcaagcaaacaaggacatcttccacaaagcaatctaggcaagtgttcagaccttctggccactggaccacgttttcagggcatcagggcaactatgactctttatgatctgacacctttgaaggaagtcatcaggaaaatgaactagtgtttttgtgtttcacttattcccacagtccctgtgtaggagattgtgttcaatatttttgtttaaaagatatctaggccagacgcagtggctcatgcctgtgatcccagcactttgggaagctgaggcgggcagatcacaaggtcaggagttccagaccagcctggccaacatggtgaaaccttgtctgtactaaaaacactatttttagtatttttactatttgagaggctgaggcaggagaattgcttgaacccaggaggccacggttgcagtgagccaagatcatgccaccacactccaacctgggcaacagagcaagactccgtctcaaaaaaaagtaaaggaagttctattacttatccagggttctatactcctcaccgtcacagaagaatgtttcttttatctcagacaaatcctgcctcctataatttaagtctatctccctttgttcagagcagcatgacttctccataatagcacaaaggggcttcagggtccaacaaattattgacaattcaatctgatttggcaaataaccattgagtactatattcaatatgtcaatattgaataccaaacttaactatgttgttgaagtctactgtgagacttggcccttgagcagagcagagactgtgaggaagaatgagtgattcgttctgaggcacaggctattactgttgggcattttgggtttttaagcttcttgcagctgcgtttctgctgcccatgtttagaagaccccatttcatttttatttttgtataaacttaatgggtccaagtgaagttttgttacctggatatattgtgaagcagtgaaatctgggcttttagtgtaaccgtcgcacaaataatgtacatcgtacccatcaggtcatttctcatccctcaccctgctccctccctccctcccacccttccgagtctccagtgtctattattccacaccctatgtccacatgtatatattatgtagtcctacttataagtgagaacgtgcggtatttgactgtctgtgtctgagttacttcatgaggataatggcctctagttccatccatgttgctgcaaaagacatgatttcattcttttttatggctgagtagtattctacagtgtgtgtgtttgtgtgtgtgtgtgtgtgtgtgtgtgtgtttcacattctatatatatccatatatataattacattctatggtgtgtaaaattattcctatttagtaaatatggaaagtggaaatggaaatcaggagatatatagatatagatatagatgatatagatatagatatagatatagatatcacattctgtttatgcaatcatccattgatgaacacttaggttgattcaatatctttgctattgtgaatagtgccgtaatacacatacgaatgcaggtatcttttttaatataatgatttattttcctttgggtagatgcccagtagtgagactgctggattgaacggtaattctacttttagttctttgagaaatctctatattgttgtatattgagaaatctctataggggttgtagaagactccattttaaatcgcatcccaagtacttccctagatctacttactgtttatctaatttctgcaccaggtaaacaactttactgtcttctttcctttctgtgcctgctgtaggaaatttttcaagtttttgtttattggccactctggctaaaattcttcagggcaaaggaactacagaaccttctccattaatgaggcacagagtccatccccacaactgtaggattgcagttcagtccacaaactcgcaagaggtactgctaatgcattagtcccttgtttattaagatctcatctctgcccaaggggccatcaataaattgcccatgttgtggtgccatcactagcttgccccaaggtccccccagagttgtttatagacaggtggatgttgctgagagagccacataaaacaggtgcaatggaggcatgaattctgcttgtggtggcagtggatggagaactggcagtgggggccctccgtgggggtgagaagcgtatgtgttggcaggaacagcagcagcggcagcagcagcagaggcagcaggagcagagaaatggaaagagtgtgggttttaatgcatcactagctgctctcccaacctcatgaaaagtttcacctccctactcatctctatgtaggtctttctaaggaagaaagagggagatcaagattcttggggtctctttagaccaataccttccattattgaaaacagctttaattagaaggccttaaactcccttcccaattagctctgtgatgaattgtgcggtgtcaggaaagaaactgtatttagccttgcttggcatgcaggagttccatggtggtatttacagggaacactcctggcaaggttggcgatattgctaccaccatttgggtttgtttgctttttctcactggcatctgccattgtgctggcagaaataaatctgataatttgggattttaaagaaaaaggtggtttacctattatctgtgccctaactatatccttgcttgttccacggggttataaaacgtcaagcccagatcatgcatttgcccagtatcctaaaagataaatggtacttcactctgtgtagaatcaagcataaggtgctgagaaataagcaaattatatgggtcactaaaaattggcttccaatctgggaataaaatccagaattactaactctagtttctagattctagttgccaggcttcctttcccaatgtcaaggaggaggtagtcaaaatttcctcaagggtttgtttcctatatctttaccattaagtagatatgtggcaaaaataataacaataataataaaatagatatttcacaattgccatgttatgaagagtgtgtgagtaaattgataaatttatttttaatcccattttcattttggcttagataacataaaatattactgctctttacatatgatcttaaattagtttcaactctttttaatttgatgattcttagccttttctccccagacacatttattagacaacagaaatactctgggagatgtagctttctaaaaggactcctttggtgactatctttctaatgtgaagaaaaattcagtaataaaaataattatcatatttcctgggtcggttctataaactgagattttcacattttataataagaaataactgtgtcattcttctatataaaagatagaaaacatgggtgagtaaatatcacacaaaacaatgaatatttgtcggcctaaccctttttttttttttttttaaagagacagggtcttgctctgtcacacaggctgcagtgcagtggcaccatcatagctcactgcagccttgatgtcctgcactgaagtgatcctccctcctcagcctcccaagtagctgggactataggtgcatgccaccatgcccagctaattttttaaattttttgtagagattgtgtctcactaaattgccccagctggtctcaaattcccggcctcaagagatcctcccgctgcggcgtcccaaagtgttggaattacaggcttgagccactgaccatggcaaaactttttagttgtgatgatattttagctttaatatcaacttttcatttacttgccttacataatctttaacccttttgtctaatttgggctagacaaattagactttcagacaaatatgtatttgtctgaaagtcataaatacatataaagaatctaccttttgctcaacattattggggatgaaaaccatgtaagtcttttgaaatttatgtaattacatctttgaaagagccatatttttctccaaccactttatcccagcaagctccatcaggattcccttgctcacccatcagtaacatctaaggcaggtcccatgattttccagtcacttttcagtggcaaggatcaacgcaactggtgattaagactcattccaagtgttttttaaaaacttcagtctagactgggggcgatggctcatgcctgtaatctcagcactttgggaggccgaggtgggtggattacctgaggtcaggcgttcgagaccagcctggccaacgtggtgaaatcctgtctctagtaaaaatacaaaaattagccaagcatggtggctggtgcctgtaattccagccactctggaggctgaggcaggggaatttcttggacccgggaggtggaggctgcagagagccgagattgcaccattgcattccagcctgggtgacagggcaagaacctgtctcaaaaaacaacaacaacaacaacaaaaactccagtctaaattaaaacctgatatgtgcttaaggatctgcagtggggaaagagggcatggtcattttcctctttcttcagttccctcttctcttatttatttccccaggatcatggcatgaaaagaaagaattagacaaaaaggaacagagctttactcaataatattgctctaattaatcttctattaattttgagggggcagatgcctcatgggattttctctgtgggttatataggggtccccataggaaattccatgcctcatagtcctctgatgcaggcaatacactctctggctaatttcttactatttgttattgtccaagaggtccaccctacaacctttttttgcctctgggggcccttctcccaagcaggcagccaatatcaagtcctatcacgttgacaaaactcattcctttcttggcacccactaggattgcagaaaactttggtttcaccaaataatgaaggtacagcttgtccagtactatattctctgcttgacctatcatgctggatgaaacctagccagtctcctaactttggaattcattgactaagacacaggtattagcttctgtgctagcctattatcccaaaactatgggatcacttaaggatttcagaagacccttttgactctagtcattgcatcaaaattgtcctatgaatttcatcagtgcagtaggaagcctcttgccaagaccagactgttcatctcacttttctggcaacactcccaatttcttcaagagcttctcttggatattccttgcatgccttgaaaggggagtgtggagaaatcccattccctccctgaagtgggaaagatataaccaaagcctctttcttctccactgaatccccttctttaattttttttatgaacttggatcttctcatataggttgtctacatagatcttcataggaagatggatcttgaagtctgttttttccataagtcatgcagtgatatgtctagctgttccagtagagttacttaccacctatttttctaaatcatactcattattctccaatacagttctgtttcacatcctattatataactaaatggccctatcatctttctagttgcacaagccagatcatttttgagtcctctctcttccttacttccatatcaattcttcactaagtgctattgattctatttccaaaccatatcttaaatccttccacttgaagacaacattaggatcttcacacatgttaatccctcctcctggaatgatggctcattctcctataattcatctgtcctcattcttactcatcaagtctgaactaaaatgttgcttatctcatagggctgctgcaatgactaataaattaatgtatatgcaaagtactgtaaagggcaatataaatagactataaacctttagcagtccttctttttgaaaaaacagagactggaataaattagcaaatgtagataaggttctggtttgtctaggcaactgtactaatttggtcatgagtgaaaaaccttatgttttatacattttaagtgttcctcaccttgcaataaaattctgagcttgcaaatttacatgtttcctgataccacattgttaatttccctgtaattttccaaatactggattaggttctatttcctttctaaactgcctgaagcaagaacatgctttttttttttttttttttttgtctcctgaggtttattacggtcttatccctggcccccctgccccaacaacatcacatacctgccagtctaagagccctcctcaggagatttccaccctatatgtagttctctttacctgacatgacactcttaggaccctaccctttcccttagatctgggattatatcagcagaacatgatgaggtattttagtcacacacacacacagacacacactctcacacttctcaaatcatacaaatggattctgccaaattggcatctacctacttcccctatgccaaatagtagtttatcagtacatgagggacagttagttggtggggagactgtttgacctgtgagtcaagtatgttgctattttctggcctttaaccaacttacaaggaaaccctctttagacacctaagactcccgtggagccttgtcaaaaatgtctgtgaaagtaaaatgaactagtccacatactaacaggcccaggccataaattcagaatatatgccatttagcagagacagcaagctgtaaatggcagtgaagggcagaagttaattgaactactctgctcttgtcacagatggaaagtagccactacctgagacaagatggctgccccgaagtaccctattacagccaagagatcatatccttagctctgcaagggcttatgggtgagggggaaatcatacacagatgaccaatttttttatggttcacagccgataaaagtgaaattcagcagctgttcaggacaagtgaccactgtaacagctgtaatataacctactaaatagagagggaattgcattagagcaagaggttagctgtgatcatcggcaggtgagtgctttattgaagttgaaagaccattaacattgatagagtaattatttcaacttgaaagtaattaccttgatgggtgataacttctctagtgttcccagatttgattgggccaaacaattgtgagctcctgaagcctagaaaaatattacaacaatactgtgatttttaaattactgaaaccactgttggaatattctaattatgccgaacagtgaaaagattttgccttacacaagctagtgacctctcatgtagagagagacatttgctttttaatccaaatgcaatgacccacacccaccacctgtgaatacatatgtgatgggtttgcaaatgaatctttttatctcaatataatttttaaggtgaaacatcttgttagtgctgtgcctgggtaatagtaagctagaactgctgacatttttgatcatatctatggacttgaagtctccagaatggcaactatcttctatctttgtcacagagggtttaaatttgtataaattaaatattttgataatgactacacataaattagaatttctggatgccacgtactttggatcccaaatttcagatattatctagttacataatcagttgtttaaataactttctcgcctgatgttatgcaactccactacaaacactccattgtcagggtattttccgtttacctacactggacatcagcaaacaaaattaaagttgaaaacctgggctattgcttctctgtagtctcatgaatatatgaaaattgcaagttatttgcaattgagggccaagacacatcaaatctaattcagtgatcaagaccaagaaatacagggctcttccattaatcagtttttcaccatatttctcttttgagaatctacttggtccagaagctataacagatacaaacaaacgagaaatagtcttttctctctgaaactcgtcgtgtatttggagaaacaataagaaaagagacaaaatacaatgtaataagcaatcattttgtcatgcatggtattgattgtacttataaatagttacaagaacctaggaagactctagcccatactcctgaatccaaacccagcactcattctatggaaccacaaaccattgacagaaaaaacacaggcatcatgattcttagtcatgttgtcagaaaagatgaatgtgacatcaccttaaagttcctggatgattccgtagacctttctatcatcttggcagggtttgatcagatgatcagccaatgaatgactatctttttggcggcacttcccaggagttttttctaatcaaaatctcagactctcctagggacaaaacaggtttctacttgttgtctaagagccaataaggaatgttttaccaagcagttaatgggtttctttcatctctccatctcggctctgaattcccctccatagacaaagtctttgggtctctgtttcagaaattaccgtagggtagaaatctctgccaagccagaagacatttgcccactggaaagtaatgtaactggcttgaatttggtaaaagagtgaaggtttgagacaaaaacataccacttgggaaagtgataaaaatttatgaattgaattgtaaatcttgccattaagccaaccaaagagtaacaaaatctgaccaatctgacagcacatcagagttcttagcacagcaggctcaccatgtgtcatatacagccaggctaaagattgtattaaggacccccttaggtactctgaatttaaaataagtgtaataactcatttttaaacattttatatgatacttgaattattaaatattcacattacaaaatcagagaattttaatccattcaaaagggtgggttgtctaacactgaaagataatggtcatgtctagatagtaaaattacagtatatttttaacggatgtacatgttactttttgacaagacacaagtagtgaattttatcgtacaaattcctattgggtgattatgatacagagttttatttttgctaaagcaattactaatgtcatggctggatacctgtgcccattagtggctggttctgtgtttttttaggatggttattgatctcttgctgagctgagattcaggttttatgccagatagcttgattaatgggttggtttctataagtggactgaatggggatagaaagcaggggcagcctgctctgccaaccccaaatccgtcaagacgcatagctcattatgaaacagttatcaaggatacatgaaaaattaattgggctcagtttgattctgaaaagaatcggctttctacttggcgggcccccccgccccccttccactctttccagatgttctgcaccagcccctagagaaacagcaaagggagacgtattaatacattgtattgattagatcaagacccctgacagttatttgtagagataccatctggctgctgttcgaattccttcaccaaaaacaggacgtgacatgttattaatctcaactctctaagtatagacagttgccttttctgctaaaccgcattttaccattccgtaggagatggaggaagacctgaagggtgcagaaattaaggttattacacaaattgagccatatggtccaaatatttcagcaagaaaattgccaggcaataaaaattgctcctgccttcctaatggtgtaaattacagtttaaccatggctctaatgatgtccttctgccgcgcttaactactgttacatgaaggacattgttttaaaaatataaaaaacaagtaaatgccagcagcgtgttttacaatctgttagtgtgtcattaagaacactgtcagaattacataaacataatggcaggcaacccagcatacaaaggaactcgtatggaaatagaaagtgtcttgaaaactctcttcattatctctgaaatgtcaagagcactgtcccctctggaagttttctagggagaaaagacctgtccatctagtgctttattctaattctcatgtgtgtcccaacagcagtgttttctaaatcaagtgtcacaacccatagtgagactaagtacacatctggtaccacaaccctgtccatatacaaaaaatgaagcagacaaggtgaggagacagctaatgaattctaaacaaaatgatagacgttgaccttttgaagtatttttgtttttggggaaaacagttaagactccactatcttccttgatgatgacatcaacaattaaaagtataatttctatcctcagcaaactaacctggcaacagaaaaccaaataccacatgttctcacttgtaagtgggagctgaacaatgagaacacatggacacagggaggggaacaacccacactggggcctattaggggggtgaggggaggaagagcatcaggataagtagctaatgcatgtggggcttaatacctaggtgatgggttaataggtgcagcaaaccaccatggcacacgtttacctatgtaacaaacctgcacatcctgcacgtgtatcccggaactttaaattaaattttaaaagtataatttctgtcatccctatttggggcatgatattaagaggaagcttacttaagataatcaaaaatctttgggaattacaataaagaccattaatatttgagtaagacttgaacccttcaaatatttttagacctattacaccaaaaacacctcggcacttaaaaattccatataggtcatattgatgttttattctctaaaactgcacaatcctccaagctttttggtcttctaagatgttataaacacagtttgttaaaggaaaagtccagataaacgtttgtagaaaaatttgaagggaaaactacttttaattcccagaggagagttgccttatctttaagccctttttccttctccatttccccaaagggagaaagaccaggatataaattgccctttaaactaaaaaagaaaaaagagagggaaaaaacctaggaaaccaaaaaattattctttttgcatgcatgcattaatattaatgagaacccattaagttattatttcctcatggcacaaatggcaaggctagcaatctattgactagagcatcttctgcctggaaagctcttacccaggtgtccccatggttggctcccacactttcttctggtcttaagtgaaaagttactaccactaaagccttacctggcctactcagctacaatttcactccactctccctcacacacactttctattcctcttctgtctttatttttctctttaatatttagcttttatttctggtttcttgctaacctgtaatcatatttcagaaattgtttttcaaatgctttgttatgcttcttatttcacctaaaaggaaatctgtatgttcacagctaaatcaaactgagaaagcatcatttatatgttccaatttcaatttataagctgacaacttccacataaaacatattatgggcactttacacatgccatcttatttcacctcaataaccaatctgtggagtattattacctaaatttattaatgaggaaatggaaactcagagaggttaagtagcatacccaaggtcacacagctagctgcagagtttggatttgattgcagctctctcagcttctaaagccttttctttctgttatccagtattgcttcttgagtttcagcctagtggaacaagatgttatttatgaaaagctaaacatcaatgaaagccacaaattatagttcaataggacaaagagatgacacagagcttgatatgattcattgcctagtataaatatagaaaacaattgataaaagtttcaaagaattaaaagatcacttggactggaaaagttcagagaaggcttttgggagaggtctgtgctttgaacaatgggtgaaattcaaatagaagaaaagtagaacagatattaccttattcaggcaaagaaacagaagcctggttttgaaacatctgatggcaagtctctgcttcaggaggtcacatggggaatatttttccaatatgcccccattaattgggctgatattaaaacaactgatttaaaaaaaaaatcaaaatactcccaagagatgcctagcaaagctattgagtgaggtggttagcagcatgggtctggggtcaggaaacatagattagagactggctttggcttttttactcattgtatgccttcaggaggttatgcctaatagtgcctcccgcagagaggcagcacctcttagagtcgcaggaactgagacggcactcagtaaatagtggtgagtaagattcaaaataggttttcagagaagaaatcagcacatgaagatatcatggtgtcatagtgtgttgacagggtcctgtctggagatactagtccagaatttcaaaaaaaggaaaagttttcttctggccgggcgctgtggctcatgcctgtaatcccagcactttgggaagccgaggtgggcagatcacctgaggtcgggagtttgagatcagcctggccaacatggcaaaaccccatctctactaaaaatacacaaattagccgggcatggtggtgggcacctgtaatcccagcaacttgggaggctgaggcagggagaattgcttgaacccaggaggtggaggttgcagtgagccgagatctgccactgcactccagcctgggtgacagagcaagactccaaaaaaaaataaaagaaagaacaaaagaaaagaaagacaggaaggaaggaaggaaaatttattatattttcttgtttcccctgcattccctaatacccctttcccaaaagtatggatttcttcactaaatatgttagtagcagaatggtcttgtggcagttgacccaagactccaggtagagcagtggggaaagaaaagacaaggccagccaagaggccagccaagaggacaagctcctccaaaggttgacttgagatattaaactcattgaaaaagttactcaacatccacagtgttctggtggtacctcacttagtcctggacaatgaatcacagcccaagcttcatcattgaattggtgacactgccgagggccaactcaccagccttcaaaaacgacagtgctgctgacagcaaaggcgatgaggacacacatgtgcatccacccttgagatgctaaaagaggcaggaaagaacttgagggaaagaacaaatcactcttctgagattgtcctataaactttataccaggacctatgctatcatcctccttacctaatcatgtttaatatctgatttataagaatctaaatgtgtacctaaaagtagctttctaaatattactgggccacattaaactgtgaccaattttcttccttcctggcctaccacattttagaaatatgatagcatatttgggttgggagtcgctaaaggcctcaagagagtccatctctttgtcctttctgactaggaagacctggtcatcacgccacaagccttggtgtctcgtttttaacagagcaataattatttattagtggaatatatgcttattatatccagaaattaaagttgttaggggacatttgtgtatccaggtccctgtggctgggtgatcgcatctgttagaaataaatcactttaagaaaattatattagccccacagacagtcaagaatggagcaaagggagggaagtgtgaatagggtgaggaagcttgattttaaatcttgtgaaatagagtgtggtcaatatgttgtcagcacattacagtgtgcagacatcaactccatttttcccctctttgaacctcaggtggccaattaacagtatatgctatttattcattacaaaacaggcaggacaaattgaatggttagaatgactaataagaattcttagcaaggagtaaaataaaaaatgatacataaggagagaccccccagaaaaactttagggatttccagaaaaaaaagtcttgaggagttttcctgttaaatgtatctagaatttctactgacatgaggaaattaaaatggaaagattctctttgaatacattttcttcctaaaatatgttctcttcaattccctcatttgtatttccttagagtttcattccttcctaaagcagaaagacagttttaaattacttctagcaattataagtatcattagggtgttttgatgctgcatttttacaacaagcactgtgcttgccttccttatttgtctctcagttcaactccaagtcgcaacacaggaaatgaaaaccttgtaaattgacttgatcttatgaatactcacttttgcaaatatgaaagaacttaagaagggattataaaatactccttatctatataattaaaattcagttgaaatatatgaattcaatattttaattcatgcatttcattttgcgggcattcaaagattatatgcttctatatgtctgccattgatttctgtaaataacattatctctcttattgcaaaacgtacatcagaagaagttggaagaaagcgagggcttgagggatgttaaactgaagcagcagtgacttactatgcagtgttagtagattgcttgccttgaggatctagaagccgatagaagaaatggagccagcaaataagaaatttcttatttcttattccagaaataagaaattctgaacttttaccttcaaagatccaaaaagaacatgctaatgttcttttttttctaacttttgagtaatttagtcattctcgttcagaaaattaagggtctacatctggcagcaactgaaataaatggctcaattgagtacacacttgaatgtcaaatatatcactttaaaagtcaatatttgtttcagctgtaaatgtttctgaacggaaatgatgcttttagtgtctgtagtctaaggagtagttttatttttgaaccctcaaattgagtgctccacctagagccgtaggaccctttcctttccatgaggagagcgccctctactgggtatgtttacttaccacgcatgactgttaagaccctgagctaaacgtatgagcagttgagatgtacataagaaagagtttttggaaaatctttgcccctgcttgtactagaatgattgcaagtgtggaagtagccatagttcactgtagttttctttttactgctgtattattgcaccctgttgggggatacatctgagcatttcatgtgtcctacttttaaaatgcccagatggtggctacgtgctttggtttgaattgggcagccctcatctttcatgctctgtagtctgcctcgttatcagagagacatgagacaaggaaaattcttccatttttcagctcctcttcatctgtttctagtcacccacagtgaatgatgcacttgcacaattgttaaaatgacagtcactgtgataactgaacatcacttccctgggatggggagttccctatgtacccatagcttcttgattccttcccaatacagcacctttttcagtgtaactgatcacttgcaatcttgtaagtaacacagcagtgagaggcagtgtaaatattttataccttgccccaatcacttgtatgtgcatcggtcttcttcactctagcctttaagcttaacagagattttaaatcaaatcattcaaccctagaaatagtcaaaagaattaataaaataaatgaaacagtgtaactggttaaaatagccccagtgcacaatacaggtttagtatgattttgtgacatacacattttatagggcttttgtctccaactacattcttcaaagagccatctgggcaatgaccataggtatcatttttaccaataatagtcagcacttcccactgggaaattagtcaagggaatgagtttttttttttttttttttttttttacaaattatcttcaagcatctatcttccaaaaagtattactggactttgtccattacaaggcaacaacctaagtgagttacttgtgctcttattttagaactttattcatcagatcattgtgatcaaactcaatttcattttcaaagaggaaaaagattttgctctgtttttcttcttaataataggtttgctgaaggaagaacattaatacaggtcagcgatctccaaactttttagaatattcacttgtagaaataataatttggggagcacacatctgcataatatgtatatttacttatttgtaaattataaaatatgtactagttaaatagtatcatttacactatagaaatagacatttttaaaggagtggaaatagataaaattatcaagaaaatattttattatgagcaactactatcaataatacctcaaggcacaatacacactgaaagattaatcattaatgatgctgaatgtcaatctctttcctgagtgttcttgatcatttcaaaattttgttgacacttctgatcaaatacaattggaccattcatgtttatacctcatgctgtggttgataaggagcttgaaggaaggagaatcagactggccatttatttgttcttcatttatgtttgtattgttagtgttatatttgaatcataaatttgaattctaggaattttgaaagccattcatgtttccaaagttagtatacttaaaaccagataatataatccataaacccccttagcatagaaccataaactacaatatgtcacttgacacaaggggtccagaaccccggggacgcagaccagtactggtctgtggcctgttgggaaccaagccacacagcaggaggtaagtggagggtgagcctcaccacctgagctccacctcttgctgtgctccacctgaggagtggagcacagatctgctccacagatcagctgtggcaattgcttctcacatagcaaaccctattatgaactgcgcacgcaagggatctaagttgtgtgctccttatgagaatctaactaatacctgatgatctgaggtggaacagtttcatcctaaaaccatccccacctcccccttccatggaaaaattgtcttccatgaaacggatccctggtgcccaaaaggttggggatcactgctttgcactaaaagcaaacaaatagatgaatattgttagctcctcgctgtaaaactcccattcttccttttccaaggacagatacagaacttaattgattcattcattcactcatccagtcagtatgtgtatgcatctaatatatgccaactgggtatatgacagtgaataaaccagacaaaaatgcttccctcttgaagctcttactctagtggggagataaagacaataaacaagataaggaaataaaatatatacataccatacataagctaagggcaatggaggaaaataaagcagattccagagtctccattataaaaaatacaacttttgcaaattggtctttagttcttattgagtttaaaaggatgtttcccttccacatccttcttcccactgtcttctgggatttttgcttcagatatgatggtcaaattgcttattataaattcccttctaagattctatgagttttaaatttgttttaattgttcacatgttgcattgaatgatgcaattgtactcttctagcacacagagctagtaaatttcctatatattgatatttaaagcctgtccttttatggagtattttgtgaccacctaaacccatgatgatttcttgtgtatacaccttcagtgcttggttcccatgtatttctctagtggtttcagaaaggtgagttttacattcctaatggattacagttcctaaaatccagtatgttcatactttctacttttattcctttccatttagtgcctagaaccatgccagaaaaagacataatttgactgtggatttaaccctcagatcacaaaccaatctcagagctttatttttttgctgagagttttaaataaactataaagtcaaatttaaacaattatcctttggaatcaacagaaccccacatttccttagctttccttagctgttcctattcccaaggatcacattcagagcactcttcttgagtgacagtgatgtgccaggtacttcacagaggtcatctgttttaattgtcacaaaagcccaagagaaagatactaactgttagaaatctagctcagaaaaagtagatgatttacctaaggtacatctagtgtgagtgacaatcagaacttaaactcaattcttctaagttgactgctgttttgattaaagcgcctgggctctcagaagtggactcttcctgggtgttagtcacaagggcttctcagaatttttctcctacatatgagacagcagatcatttctgcctctctgctaagataagccaagcaaaataatagattgtagaacaattaataatgcattcaaaatgccaaactcagcacactttctatcctttgtgaaaaattttgttcccattttgtccaaatgtctaataaaaatgattgtggaaaaataaaaacaatctttgatctgcctaaatgaaaataagaaccacaacttctagctctcagaacaaatcaaagttgtttttatttttaattaagtatgctaagcttaagtacattttctcttaaggtgtaattactaaaccatgatgatttctttttgtttattcatttaaaacacaaataaaagcagataatcaatagatcataatctaaaactagaggatttacaagttaataagcttgagtcaatagatattccataacaaagctttcaatgctgaacctgacataatttgctttgcactaagctggttgacttaatgctttaatttaattccaatattaactgaaaaatccaaagaaaaggggaaaatttaaatcctattatactgaaatatgttcaaagcaacaactcaatatcctgccacaactgcttaagtgtgccaccaaatgtctgcttaatcacctggtttctgattggtgataaccagttaacccgtttggagcctggtacaagtgaattgtggaagtttctcagtggtccattcatgcaatagcttttatcttagcctcaacagtcatcatattttcatctcataatgtctacttttcctgacttatggccaaattattggagttgtttttatttgaaaagcaatttctccttgtctcttgagattaccatccagcctgacctcccaaaaagcagaacagtaggcaggcctaggtcaaagaacagaagaaagcctttcttagttccctgaaaggaagatgtaagaagctatctgtatgaagaaatagcattagatggcatccatcatgcaaagtctggtagtactagtagaggtagtgagagggatgtgaggcaatatccagcataccttcaaggttatgagcacagactcaaaagacaggatccccccaggcaaatcctggttcttccccttacaattatatgaccatggacaatgtgcttcgactctcttttcatccatttccttatctgaaaaatgagggtcataatagtgtctatctcataaggttgttttaaggcttacacaatttaatatacataaagtacttgaaaagcactcattgttatcatcctttgagatactcttgaggcataaggaacttatgctaagaataattttgagaacagcagcatcagtcactgaatatagtagtcagatgtgtctttcagaagagttatgtgtgcacggccaaagtcctaaatattccatttgttaccatccttaaaatatcatttgtgaatttgtaactggtttttgctttgtgtcattgctggtcgactgcagtcagggtggcagtgttttggctgccccctaccatctttagttttctggtcccattagtgttgtgaccaagaacaagttagtgccctttgctcaagtaaatgggctagaagttaagcactgaccttttaccataggggacccttttctattctgaaagagaacttagaaaacagaacagaaatctcattgatttttacaatgcacattttttcatatttctccgtctctgaaattgcatgcatctaacaatcttataatcactgtagatggcagttgttacatacttgtcatttcctgtgcctgcacaaactctcgtcacttcacttgagttctgtgcaccgttggtacgacacacacattgagtttaattgccacttaaaatggcttcaaaaaatcatactatgatttggcattaaaataaaaagtatacacaaaaggcacagaaacagtcacttcatataaaacttaaaaagaaaaaacaaactatgcccatgcaagtctaaagaagtctttcaataagtataaaatacacatctaagtgataaaggaatcactgtgttcttgttgaattagcagcatatttttctctttcttagggatacataaaatagtttttaaaaaaataacagtgtgtttaaatagatgaaatcctggaccccaaaaataggtgtgttttataataaatatttttaaaacagctagcatattgccaataagataatgtatttaaataaaagataatttattcattccgcagacatctatagagcacccatatggtgccaaacatattttgtatccctagtccctgtcctctaagagttcaaggtctagtggggagaaaaggcaggtaaatagatcaatctaatataaaaatgccataaacagcagaaagaacagagaagagagacaagtaactcagtctggggagtcaagacactcttccaaatggagatgacattaaatttgtattttcaaggatggaaatacatcctttccaggcatagaagggcattctaagaaaagaggaaatcatgaacaaaagcgcagcctcattgaagagtgtgttgtaactgggtctgagtcatgagtctagggacagggtgtgaatgaaagaggcagaccagggagaggctaaggatgtgcccaaagagacaggctgcaggagattttgctggtaagggctggcaatcaaaaccaccctgcttcctaaccaggtctaggctctggcatcactctgacttttaaattaggaaagttagagcttgattcttgcacttgactctgtcaatgcattaggatctaggagagatggtaagtgatgttggaaagcagtccaaagttcataagcagttagctatttccatccaaggatgccatgatttcctctcctgaaactaagtgaacagccatgggtaaaaatgaactgaaggcagaacatgggcctctcatgtaaaagcagaagtaggggattcccaggcaagatggccaaatagaaacagctccagtctgcagctcccagtgagaccaacacagaaggtgggtgatttctgcatttccaactgagatacccggttcatcccactgggactggttggacagtgggtgcagcccatggaaggcgcagaagcagggtggggcgtcgcctcacccgggaagtgcaaggggtcggggaactccctcccctagccaaaggaagccttgagggactgtgccatgaacgactgtgctatctggcccagatactacacttttcctacagtcgtcacaacccacagaccaggagattccctcaggtgcctacaccaccagggccctgggtttcaagcacaaaaccaggcagctgtttgggcagacactgaggtagctgcaggagtttttttttccataccccagtggcacctggaaccccagcaagacagaactgtccactcccctgaaaagggggctgaagccagggagccgtgtggtcttgctcagtggatcccacccccatggagcccagcaagctaagacctactggcttgacattcttgctgccagtacagcagtctgaagtcaacctaggatgcttgaccttggttcggggagggatgtccaccattatggaggcttgagtaggtggttttcccctcacagtgtgaacaaagccaccaggaagtttggactgggcagatcccaccacagcaccgcaaagccgctgtagccagactgcctctctagatttctcctctctaggcagggcatctctgaaagaaaggcagcagccccagtcaggaacttagagaaaaactcccatctccctgggacagagcacctgagggaagggctggctgtgggtgcaacttcagcagacttaaacgttcctgcctgctggctctgaagagagcagcagatttcctagcacagcacttgagctccgctaagggacagactgcctcctcaagtgcgtccctgacccctgtgtcttctgaaagggagacccatcccagaaggagttcatagacatctcatacaggagagctccagctggcatccggcaggtgcccctctgggacaaagcttccagaggaaggagcaggcagcagtctttgatgttctgcagcctccactggtgatacccaggcaaacagggtctggagtggacctccagcaaactccagcagacctgcagaaaagcgccctgactgttaaaaggaaaactaacaaacagaaagcaatagcatcaacatcaacacaaaggaagacaatgaaacaaccccatccgaaggtcaccaatatcaaagataaaggtagataaatccatgaagatgagagtaaaccagcgcaaaaaggctgaaaattccaaaaactggaatgccttatctccaaaggatcacaactcctcgccagcaagggaacaaaactggacggagaatgacttcgacaaactgacagaaataggcttcagaagcaaggtaataacaaactcctccgagcaaaaggagcatgttctaacccaatgcaaggaagctaagaaccttgaaaaaaaaggttacaggaactgctaactagaataaccagtttagagaagaacataaatgatggagcagaaaaacacagcactagaactttgtgaagcatacacaagtatcaatagccaaatcaatcaagcagaagaaaggatatcagagattgaagatcaacttaatggaccagtgcaagaagattagagaaaaaagaatgaaaaggaacaaacaaaggctccaagaaatatggggctatgtgaaaagatcaaacctacatttaattggtgtacctgaaaatggcaaggagaatggaaccaagttggaaaacacacttcaggatattatcaaggagaacttccccaatctagcaagacaggccaacattcaaagtcaggaaatacagagaacactacaaagatactcctcaagaagagcaaccccaagacacgtaatcatcagattcaccaaagttgaaatgatgaaaaaaatgttaagggcagccagagacaaaggtcgggttacctacaaagggaagcccatcagactaacagtggatctgtctgcagaaaacctacaaaccagaagagagtgggggccaatattcaacattcttaacgcaaagaattttcaacccagaatttcatatccagccaaactaagcttcaaaagtgaaggagaaatgaaatattttacagataagcaaatgctgagagattttgtcacaccaccaggcctgcattacaagagcttctgaaggaagcactgagtatggaaaggaaaaacttctaccagccactgcagaaacataccaaaatgtaaagacgatcaacactatcaagaaactgtatcaactagtgggtaaaataaccagctagcatcataatgacagaatcaaattcacacataacaatattaaccttaaatgtaaatgggctaaatgccccaataaaagacacagactggcaaattggataaagagacaagacccatcagtgtgctgtattcaggagaccaacctcacgtgcaaagacacacataggctcaaaacgaagggatggaggaatatttaccaagcaaatggaaagcaaaaaaagcaggggttgcaatcctagtctttgataaaacagactttaaaccaacaaagatcaaaaaagacatagaagggaattacatagtggtaaagggatcaatggaacaagaagagctaactatcctaaatctatatgcacccaatacaggagcacccagattcataaagcaagttcttagagacctgcaaagagacttaaactcccacagaataatagtgagagactttaacaccccactgtcaatattagacagatcaacgagacagaaaattaacatggatattcaggacttgaactcagctctagcagatctaatagacatctaacagacctaatagacatctacagaattctccaccccaaatcaacagaatatactttcttctcagcaccacatcacacttattctaaaactgaccacataattggaagtaaaacactcctcagcaaatgcaaaagaatggaaatcataacagtctctcagaacacagtgcaatcaaattagaactcaggcttaagaaactcactcaaaaccacacaactacatggaaattgaacaacctgctcctgaatgactactgggtgtagaatgaaattaaagcaaaaatacatacgttcattgaaaccaatgagaacaaagatacaacataccagaatctctgggacacagctaaagcagtgtttagagggaaatttatagcaataagtgcccacaagagaaagcaggaaagatctaaaatcaacaccctaacatcacaattaaaagaactagagaagcaagagcaaacaagttcaaaagctaccagaagacaagaaataattaagacgagagcagaactgaagaagatagagacatgaaaaacccttcaaaaaatcgataaatccaggagctggatttttgaaaagattaacaaaataaatagactgctagctagactaataaagaagaaaagagagaagaatcaaatagacacagtgaataatgacaaagggaatatcgctactgatcccacagaaatacaaactaccatcagaggatactataaacacctttacataaataaactagaaaatctagaagaaatggataaattcctggacacatacaccctcccaagactaaaccaggaagaagttgaatctctgaatagaccaataacaagttctgaaattgaggcagtaattaatagactaccaaccaaaaaaagcccaggaccagaaggattcacagccgaattctaccagaggtacaaagaggagctggtacaatttcttctaaaactgttccaaacaatagaaaaagaagaactcctccctaactcattttataaggccagcatcatcctgataccaaaacctggcagagacacgacaaaaaaagaaaatttcacaccaatatccatgatgaacattgatacagatattctcaataaaatactggcaaatcaaatccagcaacacattataaagcttatccaccacgatcgggtcagcttcatccctgggatgcaaggctggttcaatatacctaagtcaataaacataatctatcacaaaaacagaaacaatgacaaaaaccacatgattatctcaatagatgcagaaaaggccttcaataaaattcagcaccccttcatgctaaaaccactcaataaattaggcattgatggaatgtatctcaaaataataagagctatttatgacaaacccacagccaatatcatactgaatgggcaaaagctggaagcattcccttggaaaaccagcacaggacaaggatgccctctctcaccatttctattcaacatggcattgaaacttctggccagggcaatcaggcaagataaagaaataaagcatattcaaataggaagagaggaagtcaaattatctctgtttgcagatgacatgattgtacatttagaaaaccccatcatcttagcccaaaaatgccttaagctgataagcaaattctcaggatacaaaatcaatgtgcaaaaatcacaagcattcctatacaccaataatagaaagagagccaaatcatgagtgaacttccattcacaattgctacaaagaaaacaaaatacctaggaatacaacttacaagggttgtgaaggacctccccaaggagaactacaaaccactgcacaaggaagttaagagaggacacaaacaaatggaaaaatattccatgctcatggataggaagaatcaatatcctgaaaatggccatactgcccaaagtaatttatagattcaatgctaccccatcaagctaccattgactttcttcatgaaattagtaaaaattactttaaatttcatatggaaccaaaaaagagcccatataaccaagacaatcttaagcaaaaagaacaaagctggaggcatcatgctacctaacttcaaactatactacaaggctacagtaaccaaaacagcatagcactggtaccaaaacagatatatagaccaatgaaacagaacagaggcctcagaagtaacaacatacatctacaaccatctgatctttgacaaacctgacaaaaacaagcaatggggaaaggattccctatttaataaacagtgttgggaaaactggctacctatatgcagaaaactgaaactggacccctttcttagaccttatacaaaaattaagatggattaaagatttaaacataagacctaaaaccataaaaaccctagaagaaaacctaggcaataccattcaggacataggcatgggcaaagaccttatgactaaaacaccaaaagcaatggcaacaaaagctaatattgacaaatgggatctgattaaactaaagagcttctgcacagcaaaagaaactatcatcagagtgaaaaggcaatctacagaatgggagaaaatttttgcaacctatccatctgacaaagggctaatatccagaatctacaaggaacttaaacaaatttacaagaaaaaaacaaataacctcatcaaaaagtgggcaaaggatatgaacagacacttttcaaaagaagacatttatgcagccaacaaacatatgaaaaaagcctcatatcactggtaattagagaaatgcaaatcaaaaccacaatgagataccatctcacaccacttggaatggtgataattaaaaagtcaagaaacaacagatgctggagaggatgtgaagaaattggaacacttttacactgttggtgggagtgtaaattagtttaaccattgtggaagacagtgtggtgattcctcaaggatctagacccagaaataccatttgacccagcaatcccattactgggtatatacccaaggcattataaatcattctagtataaagacacatgcacatatttattgtggcactattcacaatatccaagacttggaaccaacccaaatgcccatcaatgatagactggataaagaaaatatggtacatatacaccatggaatactatgcagccataaaaaagaatgagttcatgtcctctgcagggacatggatgaagctggaaaccatcattctcagcaaactaacacagaaacagaaaaccaaacaccacatgttctcactcataagtgggagttgaacaatgagaacatatgggcacagggaggggaacatcacacactggggcctgtcaggggctggggagaaagaggaggggtaacattaggagaaatacctaatgtagatgacgggctgatgggtgcagcaaaccagcatggcacatgtatacctatgtaacaaacctgcatgttctgcacatgtatcccagaacttaaagtgtaattaaaaaataaataaataaaagcctgggtgtggtggatcatgcctgtaatcccagcactttgggagtccgaagtgggcagatcacctgaggttgggagttcaagaccagcctgaccaacatggagaaacgccatctctactaaaaatacaaaattagctgggtgtaatggcacatgcctgtaatcccagatactcgggaggctgaggcaggagaattgcttgaacccgggaggcggagattgcagtgagccgagatcgtgccattgcactccagccaggtcaacaagaacgaaactccatctcaacaaaaaaaatataaataaaaaattttttaaaagcagaagtaggattacagaaagcagagaagcccaaaagatttgaatgttcactgacaaacacagcaataaagtatttgatattgcaggcttcatttgaagtaaagcttcaggaatacctggaaaccaagctacaggtggcactcagctccctaaccagcctttgccaagaggaggggtctttccagagacaaccatagagagtaatctttagccatgttatcgtctaatatcaaaaatagggggcaggccaggtgaggtgactcacacctgtaatcctaacactgtgggaggccgaggcaggcagatctcttgagcttaggagttcaagaccagcctgggcaacatggtaaaactacatctctacaaaaaatacaaaaaaaaaaattagctgggcctggtggcacatgcctgtagtcccagctacttgtgggactgaggtgggagaattgcttgagcccaggaggtcaaggctgcagtgaacagagatcatgccactgcaccccagcctgagtgtcaaagtaagaccctgtctcaaaaaacaaacaaacaaaaaaaaaagagggtgtaatggaagtgttttaatatgaccacggcatcctctcactgagatctgctaccatttattttattttgtttgtttagagacaggtctcactatgtcacccaggctggagtgcagtggctccatcatagctcactgtatccttgacctgggctcaagtgatcctcccaccttggcctcccaaaatgctggttagaggcgtgagccaccatgcccccatttgtaatttaagctgataaatgagagcaggggcacaagtctgtatccgctaactcttcagcaacagctgacccaaggccagcaaacccattgcatagccaacaaccaaccagatcctgtctttctgaagacacacagagacagtagtcagatggttatgactaataaggctgtaaggttgtttagactgacaattggtagccatgctgggcaaaagggaaagaaagaaaattaagagaaagggaaaagagagagaagtgccatgcagcccctgagtgacagagagagaaactcagttctgacagttttccagtttcaaaacccaaacctgtaaagttgacccttgaacaacacaggtttgaacaggtccacttacccatagcttttcttctgcctctgccactcctaagacagcaagagcaattcctcctcttccttctcctccttgacctattcaacaagaaaatggcaaggatgaagacctttatgacctttctcttccttatgattttcttaataactttttctctagcttgctttattgtaagaatgcagtatataatacatataacaaacaaaatatgtgtttgttgacagcttatgttgttggtaaggcttctgttattagtatcctgttagtagttaagttccgggggagtcaaaagctatgtgtaggccaggcacagtgggtcatgcctgtaatcccagcactttgggaggatgagacaggcggatcacctgtggtcagaagttcaagaccagcctggccaacatggggaaaccctgtctctaaaaaaaaaatacaaaaatttgggtgtggtggcacacacctgtaattccagctactaggaggctgaggcaggagaatcccttgaacccaggaggcagaggttgcagtggccaagatcgttccactgtactccagcctgggcaatagagagactctgtctcaaaaaacaaacaaacaaacaaacaaacaaaaacagaaagttatgtgatatgtagacgtttgcctgtgtaggacattggatcccctaacccttgcattgctcagaggtcagctgtagcttctgtacaggcttgggttctatacttgccttttctcttccttacaaaaccaatcaaaatgagtttcttttccctgtaactaaatttccttgactagaatattgattactgccaattcccacctttcctgtaagttgtaagttttagaatctggttgtttttttttattgggaaatacaattgatttttgtatgatcctaaaattgctgaactctataattgtttatttttagattctgtggaccttttaggtagttaataatcatatctcatgcttcaaaacccatgtaccttgtgttagaataagataggataggataggctctggtaacaaataaaattccaaatctcactacctaatgcaataaaagtgggaaagtcaaaggtggatttggctgcccttctccatcttatatcagtgtcagatcatgataggggaagagcatgctgcagagttctgcaagaagcttttaaggtccagacctggaaatagctgacattccttcttctcacatcccattgataagaatgtctcataacctctctatttaggggcagggaaactagcaactgcgaaaaaagtaaaataaatgaatatttggtaaattataataatctctgctgcatagctctttttatttccttatcttacattgcctaggattaccactacaataataaatagaatgcatctgtcttatttgttatattaacaggaagactgctaaagttttatcattaagtatgattttgctatatgagtgctgaatttttctcttgagatgattaaatgtaaaacaacttttctaagggctaaatcctatatggtcattgctctggactgaatgcagttgcccactccctttccaaatccttacaatgaaatcctaaccctcaatgtgatgttattaggaagtggtaaggggacaaacaagtgaagagacagatacactagagtataagatctatcaagtaataaaggtggacctgtgagtaaattcaaaccatttttctctcttgagtagccatgcttatgacaaagaaattttgaatgccttgtgggttgtttgtttgtttgttttgagatggagtctctctctgtcacccaggctggagtgcagtggcgtgatctcggctaaccgtaagctccgcctcccgggttcacgccattctcctgcctcagcctcccgagtagctgggactacaggtgcccgcaaccacgcccgtctaatttttggtatttttagtagaaacggggtttcacagtgttagccgggatggtcttgatctcctgacctcctgatctacccgccttggcctcccaaagtgctgggattacaggtgtgagccaccacgcctggcaagaaattttgaatgtcttgttttcaacaaatagttttaatttaaatcgaaaagagtgtgtaggtatgagttgcgaatttgtaattcatttgcgattctggtattgatggattgtcttatcttgtacaggtcatttgggccctatggactttaggctcaacaacaaaatcagacagttggagtacagtgccagtcacaatttttagactgtttaaccctaaatgtctttctaataggccttatttatatgagaacattttatagttaaccacaaatattttgtctgtgtttatcaagagttacaagcatagcagccctttctttactgaataaaagttcaaacaaattggattcatctttatttggagctgccaattaaagtgggatatagtatagttaagcagtactcaacatgtaggccactaatctcttagggtcccaaacactctttcaggggctctgccagggaaaaactatgttcatactaacagtaagaacttacatgtctttttcaccttcatccccttcatgagggtacactacagtggagttttccagaggctccatgatgtatgaggatgtagtcactctgctggctagtcgtatacatgtctcagtattcttttcctttaaacacttctctactttaattttcaatatggtactattgatcgatataaagatcagaaacaaaagttctttgggatcttcagttgtttttaagaaacaggggtcttgaaatgaaaacactggaactactaatacacttcacaagtacattttacctccacatagcacagaaataaaatcataaccctgtctcttgtcagcagtatgactctaggtaagacatttaacttatctaagcctcaatttccttatgtataacaatacaaatctcctagcttcatgtgaagatgaaatgggatacaccaagtctgacatagtaggagcaaaaactttgctcacaaataatctaccttaggaaggatagacaagaaaatggtaaactggttgggtgcagtggctcatacctgtaatcccaacaatttgggaggccaaggcaggtggattgcttcagcccaggagttcaagaccagcctgggcaacttagtgagaccttgtatccacaaaaaaaaatacatatgtgtgtgtgtgtatatatatatatatatacacatacacacacacacacacacatatatatatatatatacacacacaaaaattagctgggcatggtggcacacacctgtggtgactcaggaggctgaggtgggaggattgtttgagtcttggagacagaggttgccatgagccaagatcatgccacaatactccaacccgggcaacagagtgagactctgtctcaaaaaaaaattaaaaacgaaaagaaaatggtaaataaataacttttgttaccataagggaggagaactaaacaactggggcatgggggaggagatggggaacttttcattgttgctgcacccttcacttagaaggtccagtttatgaaaagtaataatttagttaaaaccttcaaaaatgatttttaaagaatttccctgctcctcatagatatagcctggtagtttacataccacttcattttctatgaagtactgttgttgcaaatttatctatgcaaagagctaagcatgcaatgattgttgctgtgggtataaaatactgctttgctaaggatactgtagctaactcacagttaattggctgaggcctgagcacacccatatcagtttgccatatacagatttttggttaacttgatttccatatgcaaagtgagaagaaagttctaattcatatatatatatatatgtaaaatatctttctctcctgagtcatcaatctctacctcattattgaaaaattgccatcaatataaaaatatactcctggtatctcccattttttaaatatgtgactccacgggcccctccagctaccatctcctgttcctgttcccctttacagtttacagccaaacttctcaaaagaatatattactattccctgtttctacctctacacatctgttctcccttccacccactccaaccaggtttctgtccttatcactccattaaaaggctcatatcaagacgatttgccacgaaatcaagagctcttcctatgcacagcttccttaacatttcagcagcatttgacactgcttaccacacttctttaaaaaataccctcttctctcagtttcaaggagaacacactgtattggttttcttccctttattgtcctggtctcagcttctattactgatttcctttcggctgctgtccaagtcagcctcatcctgcatctgccactgagtttggtcctgagctctctcttctacttgacctacactctctccttagactattcctagactcattcaagtctacttcttagacttcactctacattcgcttcttcaccccagcccttcagcttaaattctgtccatattcactgataatacaaatacttttgaacacttactctagcccagccacaattagaggcatttggggtttagagagaatgaagtagatgcaggcctttgactctgtggagtttacattctggcaaggaaagacagacaacaagcaataatcataaaaaaatatggtatgttagaaggtgatgagtgcttaagaaaataaatcaggataaaaagaatcaaaattgggaggagacagggaggagagtgggtcagttgcagttttaaagaagagtggctcattgagaagatgagctgaagttactcatgcaaacctatgcataaagtgggttgcaggcagagaaaacagccagtacagaggcctcaaggcacgagcttgtttagtatgttttaaaattttcaacaagactagtgtggctgcagtgcagttttcccaggggaaaatgataggagacaatgtcagaaaggaagtggaagggtgggcagaaagaacaggctttgattatgaataacttgaggaactagaacagggttttgagcagaggagtgacatgatctgacttgtgtccaaaatacacttttgctatgtggacaatgaggatttaaggttaaaaataggctaactggctgggcacggtggctcacacctgtaatcccagcactttgggaggccgaggagggcacatcacaaggtcaggagttcgagaccagcctggccaatatgatgaaaccccatctctattaaaaatacataaattagcctggcctgttggtgcttgcctgtagtcccagctactcaggaggatgaggcagaagaatcgcttgaacctgggaggtggaggttgcagtgagccaagaggctgcactccagcctcagtgacagagcgagattccatctaaaaaaagagaaaaaaaggcaaactgaggctactgcagtgctgagagtgggaaagtatggcttggatcagagtggtagtagtagatgtggtgtgaactggtaggattctggatgtatcttgaagttaaataaatccagtcctatttcctaatgagtagagtagatgtgaaaaaaaagagaaaatgaatccaaagtttttggcctaaacaactggaagaatgaagtcgtcatcaactgaaaaaaagggaagactgcaggtgaagcagcttttctaggtacatcagaatcatttcagtcagggagactgaacactatgggttttgagatagaaagtttattattattgttcattagagacagggtcttcttatgttgcccaggctacactcaagcttctgggctcaagcaattcttccaccttagccttccaaatagctgggactgcaggtttgcatcaccacacccagctaaagatgagcgctttctctaggaattagaccttacgcaattgtgggaatagctgggaaagtgaagatttggggaggagagtaagaagatgggtaagggagttgccaccatgcccattcaagaagccaaggatggccagccaccttagtgtccctaccacagatgcctatggagaggtctatggaaagcaactcctctgtttagctaccatctctgtggggccagcactaagtgtcaggtggtagacctgggccactattggttaaagagtcagcagctggaaagaagagtcagattggagtagaggagaatgaggacaatctggaacccacttgcacctctgtgtctattcatcttcacatctaacttcaaccaacttcgaagagtaatggccactgatttactttcattctccaaattgtatgtaaatgtatctttaatccagaactagatagagaagatatattactgctatatataacaaagtacaacaaacttagtagcttaaaaacaatttctacttgttatctcacagttcccctttgtcaagagtctcaggccttttgttcgaggtctcataaggctacaattagggtgtctgttgggctgtgttctcatccggaggtttgaatggagaaacatttacttccaatctcattcaagttgttagcagagttcatttctcttgtgtgggaatgagagggaggccctggcttcctgttggctgttggccctcatgtcctagagaccacctagttcccctccacaggggtccttcacaggccctctcatagcatggcagtttacttcttaaagaccagctgaaggatttcactttcagtctgctgagatggtgtctgccatatttatggcagtgacatcctagagttttgccattttctattagttagcaacaaggcataggccctgactgcactcagggggagggagaatcacacaagggcatgattcattgcaggggtcaccttaaggtgtgtctcccacagaaggaattctgagatatgcagtttcaccttaaccaatctgacataatacaaacttcaaaaaagggaaaatcaagagatcatatggagacttgttaagtttcagatgtattagacatccaaatgaagaggttaacaagacaattggatacaagactggattttgggagatatgtccaaggaccctcaaatgtgtattcctaattcagtctcttcccaaaactatagtttcattggtctgtctacttgacatcttgaacttaacaagaccaaagttgttccttcccttcccaaatctgttactgctcagacttctacatctcattaaatggtaccctcacctaccctttctctcaagaagaaaaacctaagagtcgtccttcattcctctctttcccttgccttctacattcaatccatcataattctattggttctacattcaaaatataaatctatccccttaattctatgtctaccattaccaccctagtccaagccactattaccccttcctggccttcagcaaaagcctttgaatgtctcccctccctctcttgacccatgttatgaaatggattgtgttcctcccaaaatgcatacactggagccctaacccccaaggtgactgtatttggagatagggcctctaggaaggtaattaagcttaagtaaggtcataaagatgggaccttcatcctataggattaatgttcttataagaagaagagacaccagagatatctctctgcatgcacacaaagatgacacggaaacacatccagaagacagctgtctataagccagaagagaggcttcaccagaagccaaccatgaagacaccttgatcttagacttctaacctcaagaattgcaagaaaatgaacttctgtgtttaaagcaactcagtccatggttctttgctatagcagcccgagtagacaaatgcaatggcctccatatattgttcacacatcagccagaatgagttcttcaaaacctagattaaattgtgtcacacccttgtttacaggccttcgatagttttccactgaaattggaatcagacttgaactctttaccttggcctccaggattgataccatctagctcctgctcatccttttgaccttctcttgggccattcttctctccatcacccagcttggtcgcactagctcctttctgtcaacaaaaacaccaagtctgttcccatcttagagtttctgttctgctcttgctcccaaaactttgtcccctgattcttcacacagatggtgtttttctgcactcttgcctaaatgtaacttcttcaaggacctttcttacccgcccttgtaatcaagaatttcattcactcttccccaatacctaagcccaaacactaattagtgcaccaccctacttattcccttcataatttaccacaatttccaattctctctctatgtcttgatctctctatctccctctgtttatatattgcccatttgtcctcctttataatgtaaaattcgggaaggtaatgaccttgcctcccttgctttctattgtatcctcagagattaggagcatgcctagtgtataagaagctctcaatacatgtgtgtttaatcaaggcttaaataaatctaaagctatggcccaaatgaaaatttttatatgagttttagtacagttttgccactatttccatagaatagattatcagagtgaaattgctgggtcacagtgtatgcacatttttaattttgatagatcagaagtactgctttttaatatttagtgtgactgatttgccactttaaaatttaattatcacaaatttaatttttttcctcttctcctttgaaaaatgaggcatttcaaaaccatttttcccccaatgtttttatggtaactgaagcatcattgttcattttgcaataactctagcttttgctttataggttaaattgatacagccaatttgtctataaagaaaatgtctgtgaattgagtcttctttttgaattgacccctccattacaaaatgaatgatgtattctaaagagaggaaaaaaaaaaccttctcccttttcacgtatcattcttcttttctgagtgtagagagttgttggagtaaaagcattaaagtgatcccagtgttaatatgtggatcctccaagctgaacattttaagtttgaaatttacaattgttataacaattgtcccctgcctaatccattaggtgacagcattagctagaacccagagctaggaatgctttaacacttatgagtacatttgagttggcctcattgttacccagtcgtcaatagtgtccttaacatttccagctgcctcatcactgtttgatatgtacaaggggctgggacaagggtgtagagggttccactcaaacatgtccccagtatcaggagaaaacacacttcaggaaggcatggttctgatagtgggtcaggaaagaaaataggaaaattggttttaacaccattcagttattatacttcctgcctcaattgaaatcaaaagaaaaatccttgtgtctaaagaataattacaaattttgaaatagagtgaacgttccataaagaaaattttaaatcttttttctaagaaaatacttttcctattaccttgtgcaaatggcaatctatacttattggctgaataataattgagttaattaattaattcctggcagatttattatttcattagtcactgaccatgatctataccacgatagggtgaaatttaaaagttcttccattattccttcaaattgcattgcagagctcttcacacataattaggtcttaaattttttgcctaatgttacttattgtttcctaacaaatgcagttcaaaaactttagagtgacattcacagccctctttagtcttatcacaatcccctttccagccacaatccctactattcccctgcaaccatcacacttctgctttgttgaactgccacccaggtatctccagaactttctactgttccttcttctaatccttcatctatttttatctgctcaaattctacatctttcctgacctggatcaaatgccacgtctcaattaagtcttccccaagtcctcaccccctttcttctgaataacaagtatttccttagtatttctctggtgcttattatagcactgccacactgaattgtgtgtatgtatatacattattgatttgctctattagattataagttcctcagagtcaagagtctgtgttacccatcttgtatcttccattgcaattttatagagtcttttgcataaaagatgctcaaaaatgtttaaagaagtaaaccagctgctgagaaactgctaaatgtttgcactgagcattttggcagctgtgtcatcccacttggtgatgctgcctagcacatacacactaaaacaataggcctgaacactaaacaataggccatggtcctaaagggtattttgttctacctttcttgtattgtgagttgatctttgattccggagcaactctgcatgtacgtgtttgctgtcaaaataaatgtcttttttgtctcaccagctgagatacatttaggtgaagatggcactggtaaaggaagtgtgcaggtgaagttggtgaaaatgttctgacaatgtttatattttgcaggcttggaagtctcatgccaagtgaaccatggataagtattcaagtttgatatttgcctaatgcgtggtaaaaaaataataataataatttctgtatcaagactgatttgatggccaggctctgtggctcatgcctgtaatcccagcactttgggaggccatggcgggtggatcacctgaagtccgaagttcaagaccaacctggctaagatggtgaaaccccgtctctacttaaaatacaaaaattacctgggcgtggtggcgggtgcctgtaatcccagctactcgggagactgaggcatgagaatcgctcgaacccaggaggcggaagttgcagtgagctgagattgcgccattgtactccttgcatttcagcctgggcgacgagagtgaaactccatctcaaaaaaaaaaacaacaacaacaaaaaaaaaaaactgatttgaattttgcaaaatagtattagacataaatatgttgatcaacttttggggaacttaaaggttaactttataaatggagaggaaaaatcgtcctgcagaatccacgcctcaaattatctggctttcaaaaatctagaaaaatattttgtgttgatttgtctacattacgacatataaaagtcatccaattgcctggatgtactctatccaaagtcatggcttttagataacagttaatgggagctcgaactgcttctcacattttatttgtaatctaaatcagaaactctaggtctcaggtataatcattccttatcattaagacaaaataaaatataattaatgataaaggatctcggcagttcaacttaagaatacagaggttaatatacttaaatctagattcttctgaagttctctttgcacaaaaaggtgaatttttgatgtgacttattctctggttcttggtattcatcataactaaggaggcaagggaaccccgtgacttggttgggatgcagaagccaaaactcatccatttcaggataaagagcccaggataagggagaatcataaatgaaagacaaagccagaagaaatcccactggcttagaatgaagttgatggtgaccaggaagattaaccctttccaaaatataatatggacacgtaatactctgttgatgaacacaagagtgcctatacatcattgttttggttcattactgggagcagggtaaaaagattcctaaggtctacagtaagtgagcttagtgaaaatacaccccaaagaccagagggaaagctctggaaactgctggatcatcagatcaatagactcaaagatgactaagttgggaagctttatgcagtttaaacatttgtgcagggagtatccccacacagccttttattgacagctacagatcaatggtaatttttgatcattttcaacttacataaacctattgaccccatggccacctttggggcacttcaagtcatcaaaaataatcagaggagatggtgtaaaattgtcagactgctgaagactccaagtagttgcatatgtccccaggagctgagtcgagaggttaaaatatagttcaaattgccagcagaacctcaactgacagagtgttccagagagtcttgtctttatgtctcataaaatgaggcactgatttgtatccaaactctgaccttcatgcatataaagttaaagaaggaaaaaagaggctgaatcccattgaagatattagattgcaaagaatggattattcctagtaaaatatttcttcctgtttttctttgttgagtcatcttcttcatctgctgcctaacaaaagtagctgacatgcttgtagaattacgtacaatatggacgtggacatagaatgaacaaagacaaaacagaagcaagtgcaaggtggcaggccagaagtcagggacaacaaaaaatgtagtcaaaaaaatcattaggaagagtgaaaggaaggaaagagcaaaataatggcaataaaggggaagaagtaagagtattgaattaagataatctctatagaggaaaaggagtgagagaagaaggaaagggtgaataagaagaaagagaaaggaagaaacggaagaaaagtgaagcaaaggagtaaaaggaaggaaaatcgtctttagtgatgacttttcctagttagtaagacagaacgctacatctccaaaggaaggaactgaatccaaaacatctaagatccacagtgctcaagcaaatatcctaaatttaagaaaaataacaagaaacttagtacgtaaatgagagccaacccaattcacagagtgaactgcatccaaattttgcagcaggattctaaaatagtgaactttgatgttggaaattcattcaggagagaataatataaattatttcctaaaacgtcaaagaataaattggcaaggattatcttgtcatttttatgttttcttcattttttaatatagcttttactaaacattgacaaaaaccatggctattgtttagatctatttaaggagtctatatgtggtttgtgtgtgtgtgcgtgtgtgtgtgtgtgtgtgtgtgtgtgtgtgtgtgtgtataaaactattcaggaataacaaagtagccagatgcagcagtggcttgcacctgtaatcccagcacttttgcgcagccaaggcagaagggtgacttgagctctagagttggagaccaacctgggcaacatagtgatacccaatccctacaaaaaaaggaaagaaagaaagaaaagaaacattttgttttaattagccacacacggtggtacatgactgtagtcccggctactccagaagctgaggcaggagaatcacttgagcccaggagttcaaggctgcaccgagccatgatcatgccacactccagcctaggcaaaagagccaaaaaataagaataataataataaattaaataaataaataaataatgtaatatgagaacttgtcctcagtataatttcatgatacagaaattacttttacatcccaacatgtggttatttctctcccttttttttttagatacatgtagaccaggttaagcaaaacaactgttgtaatgaccctttgtaggagtatacccctaaaaattttctgtgccaggcatgcatgaacttcagcttgcaacctacaggccatatttctatattagatggtggaggtttggaagctagggcattttgaatacttctgctttcaaggatctgagccgtaaatgtttattaaacgaatctataatgaaatcagttttgttatttttttaatggttgcctggagtgtgttggatgactgaatgccagttgttaatcattaagtactcatgttaccaaaagtgtttgatagtattgccatctaggggctgaatggaattctcagctctgaaataaattataattgagcaggtgcagctattgacaatatacatatgtttttgctttatagcccacatgcttttcatgtttcttatgacaaaagcttatgaaaaaatgtcccccagcagcccaccttttttatatataatctgttagaggtgattactatttgctttggagcgtatgcttttttggcatctattactgaatattctgaacaaagaattattcttttttgcattattaatcttgcccatgtttgccctatttccacagaaaaggaatcatttatcagaaaagagtgtttgtaatcgggacttgtagcatcttcagatttaatattcattatggtcattctagttctgtgctatatttatctaaaaggccaatccaatgttatggagaaataagtttttaaatatttatgatctaacttttaatattttaaaaaagagaaattagtatttctgtaaaatttgtttcagagtctgattgctcagcaaatgtttaaatattaaaagatttcaagaggttagcgtgtaatatcataatgggacttattgaaataggaaaattgactttacaagtttttgatatgtgaaggaaattgtattttctctgcctatgtttaacacataacaagaaataacacagttaaaatatacagccaataatgtcagaaaacagcaccaaaacctatttctacattgttttgtttttgtctaaccagtttgtttggaaaacaattctgtttgattttgtcatcttgttttagattttatccaaaatgatatttggatgcccccacacataattttttctgatgttcttgggtgcctactttcagaaataactttcactactccactttatattcttcttcccttgttcatcaaggaaagaagacaattgaagaccatgtatcacattcaaacatctaataaaccaaagcagatcattgaatgtaaatatcctactaacccagtcaaaactttctcatgatttcttatatccaatggggatggtacgcaacagaaaatgccagtgtgtgtgtgtgtgtgtgtgtgtgttcgtgtgtgtgtgtttacctatgaacacattactaccccacttgcatacataattcctactttaaaaggacatatcctttcagtccagatgtggaaagagcaccccagggcctttagaaacattaggattcttagctccagtttagttatgccaaatatgttaatgctgctctccaagcagaaaaacaaacaaattttaaaaatcctaattaggctatccctttttttcttttcttttaaagcaacaaagaccaaattctccaagcctagctaacaattacttttggtaggtttcatagttttacttatggtgcttttaacaaatgaaaatatttttatatctatattaataatagacttctctaagggtgtttgtacatgtatagttgaattggcttgttactgttttcttgtgtttatttgttttattgaattcgtaagatatatatacatgccaagagaatgagagagggagactgggaagatggagagtcttgtgtacaaacagatttggaaattaggggtgttcaggttaactctccaaacccttaatattaacctggcaggcaattatcccagtctcagacatgcagcttggcaccactgatttccattttgagctggatgcagcactgatctgaagcatcatgttttgtttttttttttaatgtttatatatcacacgctttgggctgcaagcactgaaaagtcaaggatgctatctggtccactttctgagtgtctgaaatcatacaacattgggtaatatattcacggtgtcaacaagaataagaaaaaatgcgttgttttcttaatgataattcaaaactctgctgtagtgtttgcgctgctgttgcctacaagctttggccatgaggttcagagaatgactttccagcaatattgtcagtttcaaaaaaaaaaaacaacaacttaacctgttaattttcttacagggaacaagccatcaagcccacctgtacgggttagaaccattcacaacatatcgcattggtgttgtggctgcaaaccatgcaggagaaattttaagcccttggactctgattcaaaccttagaatcttccccaagtggactgagaaactttatagtagaacagaaagagaatggccgggcattgctactacagtggtcagaacctatgagaaccaatggtgtgattaaggtaatgtctaccctgcataagaaattatgtttggtgttctccagataaatagatgagccctgacatgccatcaggtcactgtgggaaaactcccttcacagcctgtttaattctccttgatagctcctccaggcacttaatcatagatcacagaaacctagcttagatgtgtgatgcttcctataacccaacactgagctaaatgctctccatggattatctcatttaatcctcacatcaaccctactaggtgggtaccaccaaacctcatgaggcatatgcaggctaagtaactgcccaagcctacactgtaagtaattgagttgggatttgaagccaggaactcacatcagaactgaactctaaatgactgtgttcttactgcctcctgaattaccctacccagttatttgcttaagacttgcctaatttatgcttcaaacagagctcattaagcaagccacaggtgtctgctaacttcccaacttctgtatgtagccgtgagaaacaatgttataaatgttgtatacgtatctcaagctctgccagcccatgagtacagggggactgtattttcatgaatagcctgcattttgatgttttgaaccttcagccacacaaaaaccagccttcatctacctctctgatgttcctccccaaggatggtggcagacatacctgttagttcatactactgcctttacctccagtctctcctggccgtggtccatctcttaggccctcatcaactaccttctgcgggctgggactgcagagtcccccagcctgcagctgctatagacacactacccttttctttgccactccttctccaagaggcagactcccacatcaattccacatcacagggttgagactaagctgttacttttaataaagcctccctgaaaaccctaagagagggatgacagcaggaaattacgtgcagcaataactaagaactgtaactagagctcacagtcccaggtccatcctgtgggctgcctctctgcctagcttcaaggcctgctgcaagtagcagtagcaagctgcttcccaccagcctgcctacatgtggacagaagccagacttctcccccctggggcaagaggcttgagccttaggattcatgaccttaaaatccaaatcacggccccaaggcacccatcagaaaagaaagctccttttccctcaaagcacttctccttgtgggtatttggagtcatgagagcatctgcttcttggtggcataattgacaataagaatattgactccttggacctttatttacatttcaccaaatattaagcaaatatttggtgaaatacttctactaagtgccatatacttattcaagagtgaacaagacagtcaggttccctgatgttacagaccgtgtgtgagtgcacgtgcgtgtgtgtgtgtgtgtgtgtctgtgtgaataaatgtggcagagtatatgaatggtgggggtacagaaaagcaaacaataagctagtaaataaataagcaagggaattactgagagcgatgaatgctataaagaaaattaaatagaataatgtaattatgcctgctcaggctattttagaatggaatatcatttgaatcaagttgacatttgagctgagtcctgaatgacaagacagagttagtcatgtgaggatatgggggcaaaatgttccagacaaaatgaacagcaaatgcaaggcctgaagccaggaatgaacttggtgtattcaaggaaagagaagaaagctagtgtgtatgaagtatttgggagaaagaaagatggcactagaagaggttggagggactggtaggagacagattgtcccaacattgtaggctgtggtaaagtttagaatttgttccaagtgcaatgaaaaattactgaaggctttaagcaaaggaatagcatgatcaaatttacgtttttaaaaatcactctggctaccctgtggaaaatggactatataaggaccaatggagtttgagaactattaaagatttcaaggtagaattgaaggtgggtcaaattagagtagcagttgtgaaatcatgcactataggtgaatcgaagatacattcagaagatagagatgacaaaatgtgttaatgagctgaatgagagacatgaaggaaagggagcgctttgagatgagttttgggtttaggctttgggctattgatgaggaaggggagactggaagatgaacaagttaggagcaagtagatagtgtgaggtacaagtctaaaactcctgagagtgttctttgctgggataaatgttcagaatccgttagcaggtggatgttatataaacccatggtgccagaggagatcagctatggagagaatgtaactcaacctgttgagagtctgggatcaagccctgaggcataaatgtgggggtcaagaggaggaaagagagccagcaaagactgataagagggaactaggctagaaggaaaagtgcatgagtggagtgtccaaaaagagaagagaaaatatgccaaaatgttgctgagagcagaagtaaaatgaaggcagagaagccaccccgagtatagaaatgaggaggtcactgtgatctcgacaaggagagtatgcagtagaatgggaaacctggttggcatggctggttgaggagagaatggcaagggaggaagtaggacatcaactcattaaagccatttagatgaaaagaaaagcagagaaatggagcaataggtggagactgtgggatgggaagttttatttaaaatcattgaaaaatactagagtacatttaaacacgaatagaaataaccagtagagggagataaactggtgacgtaggagataatgagaataacggcagtagtgaagtcttggggaaggaggaagggatgggatacagcgcttaggtggccttcagtaggtacagagatatttcattcatagcaaaaggaggaaaagcaaatcatgtaagtctagattcacatggatacagaggtcagaatatataacatggaggcattcttctctaactgcttctattttcagtgaacgatgtggttatgtcaacaatcaatcaacggtgagggagggaagagggtgttagtggttaggggaaaggaagaaatatgaaataatcacctgggaaaatgacagagcaaaagcatgagggaataaaataggattacaaattggtaatcgcctatttaaaatgtatggatagaagtttaaagtgagaccaataaaaatgtttgggtgtttttctacaaacccatttcagagcttgagtatagagggacagctaaattttacactaattagagatttgccgggtgaatatcaggggcagcaaggggtgcttggggggtcacagaggctgcaagctagttatggaacctatgctcccttcagaagatatggcagtccccttcccacatgggggtggtcttgccctgggtcctcaacaagaaaatcacaccaacatacaacattccaacataaagaggtttccaaacttctaggctgtgtaatcttagggaaaaaatggagtatgttaacaatttagtctaaattaagcttgcccaagaaccacttctgggaatgtttcaagggtgtgccttccaagggctgtaaaatgtgtcctgtcccctcttgagagtcaccatgatagggagtcatcgaaaggagtgtgtcatctctctcaggtttgttggagcaggaaaaggttggaaaatcactgttcaaaaacacctgcattcagattaacttacttcccatctttcaaaaaaaatgaaaacttgctctacatttgtacagtataataagcattcagatgtttttttccagaacaaaagactactttgcccccaaaggagcaatcagttcttccatggcctggaagagaaaacagggtgtttttttccatcccctagtcataaagatttatatacatgtatatatgtacatgtatatatatgtatggatatttgtacttatgtataaaatataggtgtctgtgtgcctaaacacacacacacacaagcatactctttcagccctggcactctgtaacaacaaatgattaagcgttgtaattccatttcccagcaaatgccgtggaaggtagaccctactttagtcagtatgagatcagaagcagttcatatccataaaacaggagactttaatactattctctactttaaaaaaatacaaataggagaaaccttgtgaataccatttaagtcaaagaatctgattcaatagcccttagttttgagataaatgtttatgtagttcccaaactgaaaaaaaagaaaagaaaaaggcaaagaaaaacattgtttgtctctctgtgggccttatgttaactgaaaaaaatcacatatccccaattaatatcagaatacttcttctaaattagggtcatcaaaataaggaacaagggggtgaaggttaaaaaggggctaagtaactacacaaagaaattgtatgctgcaagttatcccttttgcttctgtccttctgtagacatacaacatcttcagtgacgggttcctggagtactctggtttgaatcgtcagtttctcttccgccgcctggatcctttcactctctacacactgaccctggaggcctgcaccagagcaggttgtgcacactcggcgcctcagcctctgtggacagatgaagcccctccagactctcagctggctcctactgtccactctgtgaagtccaccagtgttgagctgagctggtctgagcctgttaacccaaatggaaaaataattcgctatgaagtgattcgcagatgcttcgagggaaaagcttggggaaatcagacaatccaggccgacgagaaaattgttttcacagaatataacactgaaaggaatacatttatgtataatgacacaggtttgcaaccatggacgcagtgtgaatataaaatctacacttggaattcagctgggcatacctgtagctcttggaatgtggtgaggacattgcaagcacctccagaaggtctctctccacctgtgatatcctatgtttctatgaatccccaaaaactgctgatttcctggatcccaccagaacagtctaatggtattatccagtcctataggcttcaaaggaatgaaatgctctatccttttagctttgatcctgtgactttcaattacactgatgaagagcttcttcctttttccacctatagctatgcactccaagcctgcacgagtggaggatgctccaccagcaaacccaccagcatcacaactctggaggctgctccatcagaagtcagccctccagatctttgggccgtcagtgccactcaaatgaatgtatgttggtcaccgcccacagtgcaaaatggaaagattactaaatatttagttagatatgataataaagagtcccttgctggccagggcctgtgcctgctggtttcccacctgcagccttactctcagtataacttctcccttgtagcctgcacgaatggaggttgcacagctagtgtgtcaaaatctgcctggacaatggaggccctgccagagaacatggactctccaacattgcaagtcacaggctcagaatcaatagaaatcacctggaaacctccaagaaacccaaatggccagatcagaagttatgaacttaggagggatggaaccattgtatatacaggcttggaaacacgctatcgtgattttactctcaccccaggtgtggagtatagctacacagtaactgccagcaacagccaagggggtattttgagtcctcttgtcaaagatcgaaccagcccctcagcaccctcagggatggaacctccaaaattgcaggccaggggtcctcaggagatcttagtgaactgggaccctccagtgagaacaaatggtgatatcatcaattataccctcttcatccgtgaactatttgaaagagaaactaaaatcatacacataaacacaactcataattcttttggtatgcagtcatatatagtaaaccagctgaagccatttcacaggtaggtagccatgtctcggttttctgagagtaagccactgctgacctttctattgcctgagcccttggtcagttctaatgaagactctaaaaatgggatgcaaggtgtccccaacctccatccacctaaacgtgcatagtagacaaagcacatcctcacccaagcaaagcctgcttgcataacctccagagagcagaattctttcaggtgatgttttgagagtcagtgtttcagaaaggtttgcaatgcatcctggtatctgaaataagtaggacagagatgaggctagtccccctggaaatacgcaggcccctggacagttctgacagccccgatagggtcatctggccagactgtgaagaaaatgatgtattattttaaggttaaaaagtgccaatcaatgagcgcaattaccagccagagttagactaaaacaaaatttgtttcgtgaagagccttcttatcaaatccagcacttcttccaggaataataaggcttctctgactctactttcttatggtttctcaggacagtgccactttgctagctcatgttttcctagcggtcccatctgggctctgtgacatgcatggaagtgcgttgttctccacacaaaagaatcttgcccattgtttaaataattgtttggcagttttccccatcacattttaagtaacttacatccccagagagaagggtaataagagacattttatgcttaaaatttagtaaaatgaacagaatcacttaaaaaaattaaaggctgaaagagtgttgatttccaactacctcaggtaaaattcagctattattgtaatctagtgatgtgtagattagatcctcctataattacctctgatatatagtgctgttgaaatgaaacattcgtggttttatgcatctactcatgacaattatttagggtctattaaatattaaacagtaattaaaacttcctcaggtatcctctgcagctaatccacatgctatgtgagttggcttttatattaccttacactgattcagggcattaaaaaggtccactgtagctgcagagctgtatattctagactggcttcctctttacctgactgtacctccaactttcaaaaaccatatcaatttgctcccttttgaaactcttattcaaaaagtattctagaggtgaaagagtttgtccaggcatgaaaggaatgctttttccaggctggaaagaaaagtttaatttatctgataaattgcaaggatatttaagaatgtgagagaaatctcttcattatccactctaactgaatctgtaagtggcattgacataaaacagagtatcacttctatatgaagttggagttcatgcgtggttttttgtttttgtttttagtggattaatgttcactgaatattgcaaatgtgtgtgtcctcctttcagcacccccagctggtcagtaagaagaaatagtctgggaaagtcctaagtagcagaaggaatccagcccaaaatttaaaaactaccacggataacccagaaaatgaataatctttatgtgggaaatcaaaattgacttcacagaattgcttagaagtcagatctaccatacacagctatggatttgatcaccaataaactggtagccctgtcatggtggagatcggcatgagaggagaaccaggggaggaggagaagaaagtgggaataaaataagtcacaaagggaaaaaggtgtaattaagaaagcaaaaaggtggaagagacagaacatgtacaagaacagaaagcagtgattcaaagagcaaagaggggaggtagaaaatagaagaggaaaaggctagaactaaaaggaataaaggtagaaagaagatagctgggtgcctgcgggaaaattgaaggtgtcataaaatcaatggtggttgggaatagagaaaaaagtgctcatttacagccataggcactaaatactcacaaaaactcattttgttggaaaggagaagtccctgctatgtaaatagaccttttcaagtagcagagaccagctatgaggcaaaacataattgattagttgaatttaactggatggtgataaggtgtcttcatgattgataatctggtgtgtagttgggttaactttggccccgcaaggtctttgtatcatgtaagggaggctgttttaagctgttaggtatcaggtgaggggatttattaccactgagaccgtaattccatgatgttccttcatgacctggaaacattcctgggggatcattccatgatgttccttcatgacctggaaacattcctgagggatcatttagctctagctgcaaaggtaggagtccaggactgctgagaactgcttcatactttctaaggtctgcattcttcattgctatgttaagtaattctgaagagtaccagaattttcatgccggaaagaatcttgagagttatttattccatacatccttgtttaggggaagaattgcactcacccctttcgaacagatcaggaactttagtttagaaagccagggggattttgattgttcaaaaatttccatggaaatataatttttttttgagacagagtcttgctctgtcacccaggcgggagtgcagtggcgcaatctcggctcactgcaagctctgcctcccaggttcaagccattctcaactttgttattcttaagaattagctgtgaataagaatacatgtaagcttgtcttttttttttaaggcctggtgttttaaagattcttcccatgaaaatctattttgctgaaaatcactaatttctgccttatgtcctgaaggtatgaaatacgaattcaagcgtgcaccaccctgggatgtgcatcaagtgactggacattcatacagacccctgagattgcacctttgatgcaaccccctccacatctggaggtacaaatggctccaggaggattccagccaactgtttctcttttgtggacaggaccgctgcagccaaatggaaaagttttgtattacgaattatacagaagacaaatagcaactcagcctagaaaatccaatccagtcctaatctataacggaagctcaacatcttttatagattccgaactattgcctttcacagagtatgagtatcaggtaagaaatgtgtattataaacaattcgagctgattgtttgcacccgtcagcacctgcctgtaaaaatggtgcacaatttgaaaaggcacttaaagaaatgtaggacttaaggagaataataatattccttaaaaatttttaagtggtaaatgaggaaaaaccatgttcattgcctttttcattttcttggtttttgagccatattatatacgttgtttttcttaagtagattccaggtgaatttgcatttcttattagtaaagtggtttctgccattaagattccctctgtcagcgttgccttggtaggagacactccttatttaaagatcactttgaaaataactcattactcgtaccaaaataaaatcaaatagcaaacatctctagcctcggtgctcaagaaagatacagaatgttgaaaaaagtctagaggaatacaactcacctgcccatggcgatgagttaagttttctctgaggatggcctaaaaaaataagactgcattcttaaaaagccaagaattaagaataatattcagaaaatatggtgaattctgtggaggacttctgttaggtttgttttgttttgccatcagagtccatttgcattcttcttgtgataacaacctcatttcctgtgggagaatgtgcttcccccaccctttgctcaggcgtggtgggagtgtcaatcaatgtgtcaggctgtcttctagccaagtggtgggcacatgagccgctcagcccctcagatttgcctggggcttgatcttcagcagagtgactcagaattttaaaaggtggaggtgagaagtcgtgataaaatatccctaacctcaatctaaaagtttttcttttccctgctatttccaagcatggttcttcaaccgttcttttaattccataaactcacagtaaattctcatttgcttaagtcagaatcagtgcctcttgcttgcagtcaaagaaagcttactgactgatgtaagcacttaagtgccaggaacaatgccaacagaaattttctaaaagaggaaactgagccttaaaaagcttattataacatgaaatactaaaaataataagtcaccaaaaagatagtgaccaaatcaatgagtacagtgaatacagggaacattttaagcatgaaaagaatattttaggacaataatgtatgggacaaattaccgaattaataagatttaaaaatataaataaattctcgaatggtttggaaaaatacacagatataaatccataatcccttgtttgcaattccaagtctaaaaatctcttaaaagtattttcttgctttaccacaagtcatttggcaacaaaacccaatctaaacagacttgagactatttacagtatttatttatcccatttaatatgaatatttatatgttttgctacaaaaatattgctttattataagatggctaatcagatcatggtatggatattacaaaatatacagtatatacattttatcctatttcaaaatctaaaaacaaaattattttaaaacacatcaggcccccaagggtttaggataagaattgtggtttatgtcataaaggaacaaaatacttaccgatgccaccatcggaaacgtaacactgttagaaacagccagaacctacgtgcctgcccttttgttcttttctcattacctttattgagaagtgtcacgttatcaagctgtcagttatctagtctcccttacaaataaaaatggtaccttcgtgagagagctggatgaaatcagcataaaatcttcagccgctaattaaacgcaacttaatgacccatatataagaaacacaaactttctctggtattgtgttgtgtcattgggttaaattctggtcacatgatctgtggaagtctcattccagtttttgtttgtttgtttgtttctttgttcgagacagagtctcgctctgtcacccaggctggagtgcagtggtgagatctcgagatctcaactcactgcaacctctgtctgccaggttcaaacgattctcctgccttagcctccagtgtagctgagattacaggcatgcaccaccacaccaggctaatgtttttttgtatttttagtagagacagggttttgccatattggccaggctgatgttgaacccctgacctcaagtgatcagcctgccttgacctcccaaaatgctgggattacaggcatgagccaccatgccaggccccatcccagttttctatggaatggaaagctccaagcatgtgccttgtctctagtcagatttttcatcaggcactaaggatgactaagaacaaagggacccacatttcagaggagaggcaagttaagaaccttaggctgtgtggtttcttttgtaactgttactatcggctctgtgttacactcctcctccatactcatctcactcaaatgaaagtatttaatttggtttttgatctccaatttttatttattagctaatcccacgtagttacaacataaggatagaaaacaaagaaaatcaaaatctagcttagcccaaaggcccagttcttatggaaaataatattttgaaaagcatagattaaatgctgaaataaatgatcagaaaatattagtttcatttagcctgtgtaaatattgagtctatgtggaccctgagtaatcttacagaagtcatttaggaagttatatactaaaacaatttatttttctttaacaaaagagcatttttgtatttgtgatgaatttgcattgctctcaaaaccacttgagggttacttcatctgcaagtggcctttgaaaataccttcattgtcctatataaatctgctcacccagcaactgacagtgatttcacccttctgcagaggagtgtgtttttgaggtaattgtagattgtagggaataaaaacaaagacctgagaaacttcctagcagtggggaaggattaatcagaagatcgtgaggatgtatagttggggaggttgccacccacatggtgtgccttgcaagtatcagctggggctccccaccaccttcctacactacattacatcattgtactcatttctggttttgagttaaatcattgaaggcagttgttaaaatttagttatgtgaaaagaacaagacagttttcactagtctaaatcaactcattccatcagttggccagtgatagaagagggtatcgcatggataagttcttttgtttttctttcttcttttttttttccttcttctttgtttttttccttcttcttctttttctgagacacagtctcgctctgtcacccaggctggagtgcaatggcacgatcttggctcactgtaacctccgcctcccgggtttaagcaattctctgcctcagcctcctggtagctgggattacaggcgcccgccaccatgcgtggcgaattttttttgtatttttagtagagacggggtttcatcatcttggccaggctagtcttgaactcctaacttcgtgatccacccacctcggcctcctaaagtgatggatgagttctaacgggcaggagggtcaggaaatatctggagaaatggatacttatagagagggaggagctactcactgcagaaaaccaaagagggaaattaaatgagcagcaaatgtcactcacctcaccacaattcatataaccagcttgataactagctcctttgaaggtgagcaaaatccatgtgatatcacaagcaccttctaagtgttcactaatacttcaatatggaatgccctaaaggtagcatccccactgtttacagtacaagtggaggacctaagagcttgttcaaagggcagactcctgggtggaatgggaagggaccccagcaaccagtattttttttctttttttgagatggcatgtcactctgtggccatgctggagtgcaatggcgcaatcttggctcactgcaacctccaactccccggttcagtcaattctcctgcctcaccctcccaagtagctgggattacaggcacacaccaccacgcccagctagttttttgtatttttagtagagatggggtttcaccatgttggccaggatggtctcaatctcctgacctcatgatccacccgcctcagcctcccaaagtgctgggattacaggcgtgagccaccgcgcctggcctagcaacctgtacttttaacaagcagcctggatagtccacaacccacttttttttggaaatactgcctcagagggtgagacattgctgctatgctacttaagccttattttcaagcggtgattttctgaatcagtggttctcagctttgtgcattagaatcacctggggaaatttcacaacattctgggtgctgatacccagtccccattcccctgtagttctgattctgggatgggttctggaatccctgcgattcaaaaggttcccaggtgattctcatgtgcagccagagttgagaatcactagcctaaactgtcataaacagcccaaataagtgaagccagctccccacaaatgcctaatttacatgatgatcattgataatagcctattgacgttggtctatcctggctttcctaaagaagggtcctattgttttgatgtgaaactagaaaggagaacagaatatattatctacaaagtccatgtctcagctactcatataatttattttaatcttcctcatggattttatttggattttgttattgttgttttattttcttttgtttcttacttgggaggtccggtctttggtggtaagagtaaagttcaccatcatttaaaacaggggatttttctagtttgagtcatttcagcatagcttccagaattctgggattctgaaggataacactctggaggattagctttaataaagccagtgagatctaaaatatgaatcaaaaaattaggaatattactttttcttgttttccacaagaatgggttggtggctttacagagtgcactgcagggtcccattagaaagcaaacattctctgtgaatttcaaatgcaacttagtttaccaaaatctaattctcaaacaaccctgtgaatgtatgttccatgcataaatgcgatgcatctgtactaaataaaattcttccattgcacagacctcttccttaaacagagatcacagtcttgcttgtgctacagaatatttacaaatccaagaagatttttttaaagacaataatcatttctatcttcaaccctttcaaaattgggctattctaatacatgcagtgtgaacctccaaattctatgtggagcagttcttaactgtttagcagcaaattaagacaatatttttcccacaggctttgagagggacctgggtgtgagtctactctgttaagacattttggtttttacctttggggagtgagctgaggctaatgaatagctctcagtaattgtgcattcatattcatactcttgcttaaggcaaagactcaccacggatttgatagggcccgccaccaccccccctttcactgattcatgctgtcagtgacttaattagttttcctgaaactatctcactttgacagatttttgcggtaagcacccacgcacactcagggtctctgaagcattctggtgcctcatgactgggtgactgagaagcagtaggtcagtcttagaggaaactctgtgactcatggcatggggtctgaacttagggctagtgctgcaggagcccatgcagaatggcagtctgctgctttctaacagaccaacactgcccccaaacaagaggatggaaagaagggctgtggaggagacacagaaggggatcctcactgttgctgccagtggcagctgcctgaagactgccagaggtactgtggaggccttccctgcaccagcccccaccataggctaccaaatcgttggcgatgagttagaagtgggagggagaaaggccaacatcttctactccttctctcactacttctggatatttgagcacattaacctctttgggcctttcctcataatataaattaggcctgctatgatggaatatcatagactgggtggctttaaataacaaatatttatttcccacaattctagaggcgggaaagtacaaggtcaaggcacctgcagattcagtgtctggtgagggccaccttctggcttacagataatggtcttctccttatatccacatataccaggtagaagaacactagtccccttcatgagggctccaccctatgcaacctaataacctcccaaaggcctccataccatcatattcaagattagccttcaacatatgtatttgaaggggacaaaaacagtcagttcatagcactcatctataaaaggaagcaccctccagctctgtattctatgggcagagtagtggtaagctacaggtatataatttttagaaagtctaatcaaactttatcttctcttgattggtttttgtaatctacagtttgtaaaaccctacaaaataaattctcacccaaagcaacagaattttctaatggtatttagctttaagttgtgttgatgcaagtgaatgtatgaaatcagcttcagataataaatggatatatggttattcatcaccaagatggacacatggaaatataattagttgtgtctctcattgaaacctaacatatttattcactaatatattttttaaagtatagctatattataacatatgaatgtaaataaataataaacttatttagttagctacaaataagtctcatttatgttcctgagaaaacccacactatcaaaaagttgtcatgactatttcactacaagtaacagaaagccaatgtaaactaagttaaacagaagggaattgtttctgctctcgcatctgggaagggcattgaaggaatcccttgaaaccaaagaaaagatatgaacaccaggtcctggaaacctgggatgcaggactcggatgatgtaggattcattcattctgtccctccttgccccatctcagcttgtctctgtttggcttcattctgcacactttcaccaggcatctgaggaaatcactcccagattcaagccctttctgtgcatcagttttcttgtctttaaaatgtgaatagatatagcattggactcataggcttgctctgaggttaaatgagttaatatgtgaatgtgcttggaacagcacctcatacatagaaaccacttcgcccatataacaataatgattattattattacccatccaccttagagtggaaagaggactataagtcaaccaatacaggactctgactgatccttttgcactacctgccttcctgtgaaccaagagaacagaggactatgattgagcaggtgtggtcgcagggcccacctcctacaggcagggctgcatgaggtatgcgggaaatgcttccagccagaagcaagaactgccctagcacgctacacacaccaaccacgggaacaagtactccacacctgtgagatattgacaatccttgtgctctttcacattggatgctcacacccttcctgttttccaaatgaagaagctgagttaagatcacatagcttgtgcaagaaagatacttaatttctgataacttcacctttctcatttaaaaaaatgggtgtgttatgagaactaagaaatctgtgtgtctagtaggatgcctgctacttagtaggtccatgcccccatccgatccccccaggatctcactagttaaaagaaggagaaactttcattcaagactgtaaaaaagccaggttaagacatttcttttgtctatatcaacaagtcattgataaaatgttagagtgtaaaaatctcaatcaggagtacagttgcctctaaaggtgtgatactccttccgctaggaagttcaaccctcctcatccttgccatttctcttctcagaaaaagagtaatttacccacatacccatgactaaaattccaaactctgatagtctgactctacttttatgcaattagctacttgctttgtattgcctgttttctattgctgtcacccttaccccatctcttttctatatcacatttagagaaaacatattgaacacattttctgtttagttttggacttgcatttaattaggtattaatctcactaatgtatttccgaccagcatggaggtttttgtctggttaatttctcccacaagaactaagctccccacacccaccccaactcccacagctcaaggttttaaatgatttattgatattgtctgactcaggcagtgtatttattctaaaactttagggcctgagtgcacaggttagactgaaggccactgggacatttccatgtatagaaaactaaagttcgccactaggcccagggcctgatcattttttgcatcgagccttttgttcccacgggagatcatttccacctgtcagtgtgagcacattcaggagcatgctctaattctttttgttcttgttccatctctcatggcaacccttaggactttattctgaagcttctgttgttggcaatcttcatggcgcctttgggacaagttatccatgtgaagatgggttggttctcaccctcttgcagatgcaactcagatttatatttcacttaaggtgatgttgatcttcctgtctctgtgttggaagtttgtttgctgaaaataaaatgttaaacacaacagatgctcttcaactgaatgtagataatatgccattccagcctgccctcatggctcttcagatggccatgaaaacaaaggctcccaaagtcacctaaaacttaggtcctgtaaaaacatctaggaaagggtaagatgtgttttacttattttcctccatcctgtaaattgagtatttaataaactgtccttattaagcacctacaatgttcaaagtgtatacctagttactaggattgaggcaggaggctaaaatccatgcactctccccttcagggacttaaattatagttgataagtcaaataaagatgcccatgaataatgtatccataaaaatatggctaggaacgttgatgtttgcaggatctgagtgatggcaaaacagacccagggaggaagaagcagcttctttatcttcagggacagcacgatttccacaccaaactctaaaggccactcttattctactctctggccagatggttttgtgcaggacaggtggcaccttgatattaaagaggtacttgactaaaatcattccacagagacatgaaggggcaccatttctctgttccttcagtcttacaaaaagaaatccctttctaaatctccatccttatgtttagaagcctctcttagcccacctactgttattggtacccatgtaatggttcaaaatattctccactgtatcaatcgggatctcagcaggaaacatatggcacattcaaagggtatttgaagaaaatttaatgaagaggctatttatggaggtgtgggtagaattaagagaatcaataagggatgttgaagtacccagggagtaggaagagccagaagctgttaccttctaggcctgcagggacaatggaagaaagtgggtcattgagaggaaattcagccttgtcaacatgcagtgccaaagagaggagcaggagaaacaaagaacctgaactctctcttccctttgatcaaaacctaatggaaaggagccagaggagaaaagattccaggtgaggcagtctgatgaagtcagcattccagagtacagaccaagccagagaagggcagaggatggatctggggaaaaaccagctcgtcccccacactcagattgatgctgcttctcaaccagtatataataatgccttcaccagtagaatcctttctgggctagaggatcacctggccagctttggcttgtcaatctatgattattgataaaccactaagtaaatctgaagacttaaggaggattgtacttaagtacttgaaccaacagcttattacctttaaattgtaaataaacatctcaggatatatgaagcaatctaatctgcaggtggaaacaaaaatgttaacacattcaaataagtcagatgccttaaatggtaatttgtaagaacatagttgagacttcttcttgttaattgatttatctgttgatggagctgatcattactaatatgcctataagcatctagaaaactgtacggttctctctttgattcctataggcatatttctaatggaaaccagtaataaaattcttttctctaaagaatccattgaattgctctaattttttcttttgttcatgtttgaggactttttgagaaattttaactaattataaaacaaagtagagaagccatccaattaacaaatttcattgtagagcaatatttttgaaaagccaggcttttatttactctaaccctcaaagctctacagtacagaagtacctggaagaaagatacacagggaggtgtgggctaaattccaaatgctgtggggagttttccaatcttattaatgtgtaacaactaactggaatccaggagtgagttgcacaattgctatctagccccactagatcccccaaactgttaagtcattctctcctgtcttttcacacaaataatgtgatagtaatcactattatttatttagggtttgctgtgtgctaagggctgtgttaagaactgcatgtatattaactaatttaatctcaaacaaccatttgaaataggtgttattactgacactattttacaggtgagaaacatgaagcattgaaaaattagataccatgcccaaggatatagagttgataagttgaaggactcaaattcgaaccttaagattcagtttcaaagactggtttcttaaattctaccccaacagttacctccaaattgcatttgtatgcagctttgggactttcaaaaatcaatgaaatatttataaatgtattcatcccctaccccattcctcagaaatttctagaaacaatattgcatgtaaatcttaaaatagtcctgtgggatagatgttgttatttcttagcatagtcaagaacctgaatgatttagcaagttacctagtcaaaaagcaacagagtcagaactcaagtcctgactttctgaccccaagttcaaggtggctctgctgaactgcagcttcttcaagtcacctctatcaggagcacaaattcctgaccctgtgaagacagaccgattagggttgcagtctaggctacatgaattaccaattctggatcctcagctattaatttaaactcactaaacctcagttttcttatctgtaaaattgagattaaaaaaacaaacaacaacaaaaaaaacttaccccaggaaagttgctgtgaactttaaataagttgactttaaggctagggtattgtcacttacaaaaaaaagtaaaatttaatatataaatacatagaaggtgttcagtatccagcattcctgcaaaatgaaaatcaaataaagtcactctcctactgcaaaccctacttcccccattccataagatgcaaactcctctctagttccatgaggactttcgtggtctcatttttgtccaattctgtcctcatcccattgctttccggcccttactcactaaggtcagccacactggccttcttgaggatctagccttaaggcctttgcacatgcttttcttttccatagaatgctcttccctcagatcttcatctggtactttctgccaattgtttcccagcttgatggtcatctgttgagagaacctcctggataagccaaccattttctgctctatcaccttatgtatatcaccctacaatctcatcatttcctttctagcatatatcctaacctgtttattttatttgtgtttttattgattgcctctcctcaccaggatgttaatgccagccttgttcactgttgtatccccagctcatagaacagcatctggcatatagaaatggctcagtcaatatgtgttgaattcatggatgataaatggtcttacctaatttactatccttcacggagatgttaatcacaattggtgattgtgatcttagcttcttctagcaacttattgtggataaagtatatattttaatgctatatccattagggtatagttattattgcagagaacataatggaatttcaatgcatttacacatgtttgaacaggatgaaatatatgagtagtacttgcttctgtgtaatatgcaatattgctgaaagcatgataagtggcacgagagatggatgtcacgttgtttgtgatagtttcccctgtctcacttttaggctaccctccacagaaaaagccagtccacgcagggctctatgaaaagcccaggacagcaacccacccatgtggaaggtgtgtacaggccttcttttaatggccttatgtaggaagatgtaaagagtttgggcttttatgtcacatatctgtattggaaagccagccttaccacttaccaagttgcataaatttctgtgttcctcagttttctcatgtgtaaagtggggataataataccaaccatataggattgtcgagaggaaaaatgcaaaattagtacatagaatacacttacaaaagtgtaagtgctcaataaaccccaaaactacttttacatatcctccatgagagtcggatgggggtgggttcctgtttcctcttagggagagcagatataagaaaaaaaaaaaagtatgtgataactccaaattttgattatttagttttattgttaaaagtgaatcagggttgggaggccaaggcgggcggatcacgaggtcaggagatcgagaccatcctggctaagatggtgaaacaccgtctctactaaaaatacaaaaaaattagccgggcggggtggcgtgcgcctgtagtcccaggctactcgggaggctgaggcaggagaatagtgtgaacctgggaggcggagcttgcagtcagccgagatcacgccactgcactccagcctgggcaacagagagagagagactctgtctcaaaaaaaaaaaaaaaaaaaatcagggcaaatttcagtatttcacagtgttaggtcagtttttccttcttcaggtattagaggagaaccatattcacaagtattaaatggctccaaagagcaaggcggtatgagaagcagtagcgacaagacacccaattctagcatgggaaatgtcttgttatttttccagtagcttcacgtctctgaacttcaaaagtgctcatggaaagcaagacaatgtcctgctgtaccctcttcccctgggtcccagaattcaattaaaatcacgttctatcttgcctaatccaaagtgttttagatgaagggaacctggaaaacgggactatatctgtaaaagtgtgactgtattgtatccagcaaggttctatgcagatagagatgctggaaaacatccatttgatggtgaaagaaaatcagatagatagacagttaaataaatagctcctagagcttttcagcacattattccttcataactggagcctgcagggctactcatgaaataaaacaatcttgtaatcatgtaatttcaaattcattgcattgtcttttttgccaacattctttaaccgcgattccagcaaagaagatttcagcatattgctattcaaacatattcaaaacctatgacaagctaccctttaagaaggcattagcgtgagtgccatgggaaaatgtactccaaggttgtagatgaattgatatgatctccttgattgtatctttttatttatgaggcataatttctgagcactggaaagcaaactgcaatgagtgatgactaacaacaaccaaagtcataaatcagcagcagtgaaagaagtagtgattttgatcgaatctattgaattagctgttggccttagccaatacaggtattggaaagacctttttaatatctatttgtccccctcatgggaatgtgataacaatctcattacatgcccctaggaaacaaataatttaattgtttgcccgttaacatacaacctgtttacttattaattactggcatagctgttcatgctagattttttgtttatttctgatgtgaattgttacaaaattatgttcacattccttagtttttataaacaattatgtctccttagagcttcttgatataaatttgtcctcagaattgttgaaatgctttttttaatcaaatattgtcattatcccacaaggaagtatgttacagagtttcacagaagttgcagagagctcagatattcttccctctcttaatctctgacagttaacacttttactaatacaactcttgtaataagcagcctggataaagaacaaaaatctcaaattgctccaagcgtaaagacagtcatcatcacttacattaggagttaacagattagagatcttttgtaaaagattaatcggctgaatttggttactcctgtattacaattttatgaggagaataatagcaaatgtaagaccaaatagacatcagcttggtgctgacccatatacaaaccatccataaaccatatattatgaagtatgttcccttgatttgaacaagacttgtagcattgccttggccaaaagaatcataaaatattttcacaatttaggggtttttcttatgataccataaaggaaaaatgcatcaggaacccccttgaaatgtacattaataacttagctttgctgtaagacaatacttggaaaacatcagtcctaaggaaggttatttcagaaagatatgagacattgagcgaggcaaagcattaaggtgaaaactactttgtttagccaatacaggcattagaaagacctttttaatatctatttgtcccccttatgggaatgtgataacaatcttaacaagttaagtgtggaaattgtgctaaaaaataactagcacaggccgggcgcggtggcttacgcctataatcccagcactttgtgaggcggaggtgggcagatcactaggtcaggagtttgagaccagcctggacaacatggtgaaaccccatctctactaaactacaaaaaattagccaggtgtggtggcaggcacctgtagtcccagctactcaggaggctaaggcaggggaatcacttgaacccaggaggtggagatcgcagtgagtcgagatcgcgccactccattccagcgttggtgaaagagcgagactctgtctcaaagaaaaaaaaaaaaaaaaaaaaaaaagaataactagcacagtaacagaagcatccaaagggtcaccattcttggagatttctgatacatttccccttctcccatcctgtgcagactgatggtcccttctctttcccattcacaaaaattattacaatgcttctgttcacaaatgtttgcttttctcctagaataaaattaggaggagaaatgttgggttgagagaaattgggagcatttagaataatgttactctgcactgagagaaaaatagactcagcaatttctagaaatatcaaggtttcaagaaattactccttaagtgaaaattaggaggcaagaagtggttctacaaagtcagtaaactctagttctgtttggaactgtgaaaaaacacagtaattaactctatgatgattattgaattgtgacatattccaagatacatttattgtgtttatttgaatgactaaagttaatgtgaagtataactctaaagagacataacaaatagaaattgaaaatgtacagtgcctatattctgtacctggctctataaagaataggcctttgtatttttcaaataatattgggtgtaaaaagcgcttggaaatatgttgaaagggcagagtccaaggtcttctcaccagaaattctgatacaggtacccaaaatcattttgatgaccatggctaaggaatatattgtgacaaagacttctcttaaaagaagatttctaagaggcaattttcaagagagaacaaatgattaaattcattgttttcacagcaatgtgattatggcagcttagtggcagatgttgacactccatgtaattaaaaatttttaaggcaaaatacaataattagtcctttggggtaggaaagagtaaataaaagaacaatttcatttttttaatgaacaacaagcataaatatggtaatagtctctagttagatttaaaaatatattacattgaaaacagaaattccattgaaaactgacatattaatctatcattttgctagttaattacagaatttgtggctaaacaattttagtttttatgcttattaaaagtagttaatctatgttttctatgacattttacattgtaactttcttcatggttacaacagaaaccttagagaaataaatcaacaagtcagtcagtcctaacttttcattattaacgactagggaagtttctgactctacaatcataactgtgtgtgcacccactcattcacatgtgaaagtgttcaccaaacccaaataataatgtatttcagcagcaactttaatcatctttaatcttttattataaaagaataaatatgttcagtctatgagaacacatggacacagggaggggaacatcagacacagggaggggaacatcacacaccagggcctgtaagagggtggaggctgggggagggatagcattaggagacatacctaatgtaaatgatgagttcatgggtgcagcaaaccaacatggcacatgtatacctatgtaacaaacctgcacgttgttcacgtgtacactagaacttaaagtacaataataaaaaaatatatatatgttcagtctaaacactgtaggaacaaaaatatcctgaataaatcaaagatgaagaacatcttggcttttttttctcttggccatagaatttataagccttacttgcttttcttccccaataataactcttccatttttctaggagaagcccacacactaaagaaagagaaaatacacaactgtttgttcacaagatattttatttattgatttttatatgggttcattgcaactaaaagatcgggacatattgctaaaaagttttctatgtgggatctctgctgcttctttctctaccctataaagacagaatcgaatcttggggcattgtttctcagtgggaatcataagcataacctgttagtatttttaccctgaaccctgaactacacttcaatacttttatctcttgcttagccgggcatagacaaaaatccacagtgatattttagacaaagaacgtttttacctcagcagagacagagacaaagacagagagacagaaggagacagaaaaaatattattcacaggttcttttttccttttctcctagtggtttgatataacagagacactgcctcatcatacaagttttgtgaaattcataatgcttcattatctcagtcagctttctcttcattctgttttcattttcacagtagctcatgtaaataggttgatcctgctttgcataagcatgttgatttatatgaatgctattttgatctcaaattgattgaatactaaaaagaaagtctaggaaaaagagtaatgtattatgaaggactcctgccaaagacaaaatagcctgcatacattccctattagtgatggggaattttgaattgcctggttttcaaagagaatatttccaaggaaatatagcaaaacactataatactgaggcccaagtgtttttaaaatccagggattaaatcacattttggaactagaactccacctagtagaagttcacgtaacacaggaaggctgagatttagtacaatctacgacactaccattaaaaagccttaatagtatttatgattctatatctacattgaaaatgaaagaaaagttaatgttcataagccagagccagaactgtgctgagcacttgctatgaattatgcttatttcatctcattttctttcaacaccctatgcctgcactacttccatctcctattggtgcacagtaattaattggcaagttgttgaatttttcttttattatacctagttgcactttcttcctcattttcctccccatccattgtagcctgaatttaaattctgcctgcgctcaaatcaccaaccaaagttctgctcttggcaaaaaacgtcatatcaatatttgcaccttactttgcattcctttgtcaagaatattgttttaaatcttgtcattcattgtgtaataataggtgtcccccccaccacttcccagaaagatatttgcagtaaaagaggttgttctggggcacagtgaggagacaggaaccctcctcatcagccctgaagtctgacttcttcatgaataacctccacctcccctccctagtgtaagtctgacctcacctatttctgaggggactctgagagcagctgcagttgtattctgatggatggactctaacttccatgaaatctggctctcccattgctagctccttacttccctgtgcttaccaaaacaaacctccctcacctaagacaacttgtacatgtctatccatccttgcaagctaagacaccttaacctaatctagaattgcaggtattcgtctatggacaagtcgtttaattttcatgattctgactattttatttatgcatatggatggcatacagaatcaaaaaccctgctcattgaaacaggcactggagagcagaattcttgtttcagcacttgtaacttttgtcaccttgaacaagatagtgaaattttctgaggctcaatttcctcacctttaaaaggggactagtaatacattctcggctcaccttacaaggtttccattggaaggactaaataagctgacataagttaaagtgctttgtgaaatgtagagtttatacaaatgtgagtgattattatgcaaatgatgagaggatgtatccgagctctaaaaagagcaggtgtatctatgtaagtaggttagttgtctcttttaaaaaatgaggctcctggcaatcctatcagcaaggggctggagatttgcatttgacagcaacctgaaaacaattcaacatcagaaaatttactttcacaaaggaatccggaaaaaaagaaaagtatgaaaaccactgataggagttgacctaactactaaaaatctgtctaatgtttcttctcttgaagatattattgatgcaaaagcaaagtaaacaaaaatgaaactaaactctcactgcaaaatattctcataggttttttctttttttcccccacaaatatctcctattttgaacattctgcatgctttttttttttttcaatactgcatgcctggaatgtgtgtactgtagaatcaaacaagtttttcagatttgtctttaaaagctcgggggcaaatttttagaaaatatataatgtagaagaaacacaatgagaaaaaaatttcctgaagttaggctttcacatgaaagcttactaaggaatactactactcctaaacacgcagacagtcttcttgtattgccatttagatctatcattctgattgatcactgtgtagttggctattattgggcctaatttaaccctatacactcacacatccatctactctgtctattgtacctgacattctacaaattacttactcatgcaaatgacgacctaaggcaaccttttaggatattcgtgtttaattatacaaatggttcttgataaataagattatacatcgttccatatgtttattccctccttgatgaaaggaaatttaattttcatgcagatttggtggggacaatgtttaagaattgctgagttttttgtagtctgcagatccatccagtctgcagaagctgacaaaatcactccacttcccacacagagatgagcagttttttcattaggcttaaatcaacgtgctgcattctgaaatcctaaacggccccctttgtgttcacatggtcaaaggcaaaaggcaaaaaataaaaataaaaaaggaacagcctgctctccttgctctcctgtgtgattacaaggttgcaagatcaaagtttatctcttcctgttgtgtttagttgcttttggttgccaatttcgttttttttcctttcttttttttttttttttcccagccttagggtatcttgcttttgacagtcttgttgatttctctttggaggtctgggcagtgaattctgcaggaaaagcccccagtagctggacatggtgcagaaccgggccagccccaccagaaggtctcagagcccccacgttccatgtgatctcttctacccaagcagtggtcaacatcagtgcccctgggaagcccaacgggatcgtcagtctctacaggctgttctccagcagcgcccatggggctgagacagtggtgagcagcagagctaaaaatccaggactggttgacttttaaaaatcattactatgaaacctttgtttttatgtttttgtttttccctccatctttcttatccttctgttctcagttgctctacggtgaacttagtagcacaaatatccctcagagaagaaaaagtgaaccctgaggaaacatacagaaagtatgtaaactcttagggagagggatgctaaaggtggtattaaagactccacaaacgtaagaaactaagactttaaaggcaatcacactaatttaatttaatttaatttaattagaaaacagatcaaccacttagagtggtggcacatagtaagaagttggcaaatggtaattattggtggtgtaaatgttagtatgaaaacaaaatagagcaaagaatatccttggaatctctattttgacatgcacaaatctctaataatacatggaaaactctcattcctctggtgatttcaagaaagttctaaccctttagaagagagagcagagcagctccatcagcatagccctagctccactgtttgttcgttaacacgtttgaggcacactgggagacaggagagattgctcagggaaatcatctttcacattgtgcgttagccaagccacttcccggaagcgatgctaagaatcaactagaccagttcctgcattatttaaatgaagataccagcagccagcacgatgaagactcttgtctctgtggtatagcttgtgtcactctcaagtttctcatgaataagtggagattataatactttgttcacacaaacattgtatagagattgtgcagatcctggtattacactatgcattatttaggccaatttagggaacaatttgggcaagtgtggagaattcctctgagaccagagtgtcaggtattgaaacacaatttcaacagataacttacatacagggaggcttggattgaatgttaaaggaatattagcatattttctatagggcttcgtactcaataaatatagatgatgtaaatacaatcaacccttgattatccatgcttataaaatgataataaactaaaataatttatatttggagggcattgtatgcattttttaacagctcttcttaatcatatgttctttatgtcaacatgaacattaatttcagtttctgaactcttgttccgaagagtacttattaaaaccacaatgaggttaaaaatttgctcaaaataaaccaaaactttataatcctacaaagatgattgagagaagactatgatattttgtaaaaaccaacaccctcagaggaagagatagactttcaagccctccaatacttatacctgattttaatgtagatctgaaaagattttttgactgagaaattgcatgcaagtaaccatggcagaatatggaccttggtgaatgctgactagacatataattggaaggcagattttgttttttgaaaagacatcactctgagggtcatagactttgatcaacactttgtgtgttccgtgccattttctaatacctttctaaggtaatagataatcgataatattatgccttgtgatttccatcctgctacctcaaacgtctatttaacggttacattatcagatttttcacctatttgtcatacctctctaactgagttggtaattttttgaggataaatgtcatgctaaatgccatgttgtgtctcccagagtgcctggcatggtactccatttgtaggaggtgggatcttggataacattcatcaaacacctttaatgtttgacactgcctttatctagccttccttccttccacagctatccgaaggcatggccacccagcagactctccatggccttcaagccttcactaactactctattggagtagaggcctgcacctgcttcaactgttgcagcaaaggaccgacagctgaactgagaacccatcctgccccaccctcaggactgtcctctccacaaatcgggacgctggcctcaaggacggcctccttccggtggagtccccccatgttccccaatggtgtcattcacaggtaatgggtcaggcagaaggatgaagaaactaacaaggcatgtgtacagacatatgaactcatggtatagcctactctgcacctaggctacaaacctgtatagctacctggcactccccagggaggacttgcttattgaacagatatctatagcaaagtagacaaacaaattgatttgagtggtaatgttacctgcgatgtatttaaatcataaaagcaactaatgatagaaaggagaacaacgaaatgttttacattaaaaagacaatgcaatgtgttcgtattcaatatgctcttcctaatggttatctggaagcattccttctaccagccttcactggaacataagatacctccacagttaaatcagaattgccctgatctaatttaaaatattgtcataaaccactgtttgaaaggaaaaagaagacacttgactcaaaatcatttagaaaaaaaattatttactctaaaaagagaagaaccatttatgtctctcctcttaaaagagggaaatgtcttatctctaccaaaaaggatcactagttgctgggtaaacagcaatgtgtgtgtagatggtgacttctcttatcatttctctggttacatctgctgctcgtttccaatagcattacataaggtgtttctgagagcagtttcctgcaaatggaaattttaaagagcctgtagctctgtgaaaacaaaatgtctcctcacaaaatagaactggttttaaaagagagagttaaactaattccattacccgtcttgactctacgtatccattctcattttagctatgaactccaattccacgtggcttgccctcctgactcagccctcccctgtactcccagccaaatagaaacaaagtacacggggctggggcagaaagccagccttgggggtctccagccctacaccacatacaagctgagagtggtggcacacaacgaggtgggcagtacggcttccgagtggatcagtttcaccacccaaaaagaatgtgagtataagtggctgctaccataagccagagagattggaatgtggtcaggagaagcttgccctgaaactcggagaagccacttttaaaaacagattgagtgggctcaataacactgaatgttactgaagcattgatgaggatgactactgaggaaaaatgcctactggatttaataatatggaagtcaagggaaaatttaagaaggattttcttgtggggatagggtaaaaataaatttaggggaagttaaacgatcaatgggaagaaagaaaatgaacaaacactggtagaccatttttataagaagttttgctactccttttctttgtaaattacatggcataatctctagtatgtccagagagcattgagacatagcactattaggaaaagcaaaagggcaagtgagtgaaggaaagagcaatcaactaattaattgggggcttccttacatttttatataatacagtcacgcatcgcttaacgatggaaatatgttctgagaaatgcatcgttaggcgagtgtcgtgaaaatatcatagaatgtacttgcacagacctacatgttataacctactctgccccataggcatgtgactgtgctgaatactgcaggcaattgtaacacaatggttatttgtgtatctaaacatagaaaaggcacagaaaaaatctgatataaaagataagagggccaggcacagtggctcacgcctgtaatcccagcactttgggaggccaaggcgggtgaatcacctcaggtcaggagttcgagaccagcctgaccaacatggtgaaaccccatctctactaaaaatacaaaaattagccaggcatggtgacacatacctgtaatcccagctactcaggaggcttaagcaggagaatcactttaacccaggaggcagaggttgtagtgagccgagatcacgccactgtactccagcctgggcaacagagcaagactccttctcaaaaaaaaacaaaaaatgtaagagatggtacagggcagctccattataatcttatggaaccaccatcatttctgcagtcttgctcaaaatgtcattatgagatatatgactataacttagattttataaggtatatgctttcattgtttaataatggcaaacacaaaaagtattaagaataataagtgcttatcagaaccaactgcataatttatggagtccagtggaaaatgaaaatatggaatcctttgctgaaaaatctttaagaattccaagacagtaacagtacagcatcaggctaagtccaagactcttctatgtcacaggcccttgcaacagcacaggtcacatgccaaggaagctggtccagcttattataccccaacccagaggcaaccactactaatattttggcataatcaattcttttaatctcctttctatgggtaatttttactatatggctgaaatactataactaaaatttcatagtcagctttttatacttgacgttattgtatttgcatttcccgtggcattaaaaaaactctttagccaccaattttaatggctatacaatattccatatataaattaattgggacattttgttttttttttaatttcccattaataaatatgatgaaaaaatctttgtgaacagatctttgaatgtctggttatcttcttaaattaaattttgacaaatagaatttgctattaatacatcaagtattttaatattttaaggctttggatactagtttcatgtttgctttcaagaaagattatgtcagattataaatcttacctaaaatactctatctggcattgaatatgatgccaattttaaaagcaagaattacgcattcataaagaccaatgtctcacacaaggagcttaatgtgtctgagcaacaacatggtaggatgttagtaacagatcacatttacagaggacttgtttgttcctggcagtattttagcattttacaaataattcttacaacagacctattattatccaaatttacagatgaaaaaactgaggcagaactataaactgtgtactgcgattccaggatgccattcatatagactatgatctgaactgaggctcttggagttagacagtgacgtggccctaaactaaggccagagcttaagtaacctggccagtttccacatctagtaagtgcagtaattactctgaactcatggtcactgagctcagctgctgtctcagtactactctttccctgatcaattcatttcctactctctgtaatcaagacttcaaaccatctccaccttcgccaaacctccctctgccgctcaccctttctcccttcatgcccacaacccagctcacccatttctccctttattctctgcagaactccttgtcttgtaattttccaggaaaagagatgtcttcagtcagtaatttgctccacttcccactgcagacaaagctacctgcatataccccattgctgtcagtgacaaggaaagggtggtccttcttccgtctgaaataaacctgccttccatgcagtgaacttcatccacttcattactcaccatcccttctctctccttaatctttctgtgtatctcactttgattcaaagttccttctacccttctaatgttaaagcaaacaagctcctcttcccctgcagtgatgtggactctactctctctgacagcaaaactttcctgaggaacggtctgcagatgctttgcccatatcctctcttccacttactctttaacttcctcagcactggatgaaaatccctttctaagtttgcctttggcctccatactgatatatccagaaggcatgtttctccaggagtcaccttcactgactttccagtagcattcaacgcaactgaactttcaatgttcaatccttttttaaaaagtggtttaccctcattttcattaccaccctctcctggtttctcctctacttctttggattttcatttttagtcaactttgttggttgatcttcttccgctgcccaaatcttaatcctaaacattttaactttgtccccttgccgtttctctactccctcctttcctcctccctcatcaggtgagttcatctgctccaaggctttggttccaaaagccaaactccagtggtcacctcctagtcaagtgctctgttttgaagtgtatacccctccacccagattcctcacagacatctccctctgaatttctcataaccagcttacattggacaggccccagacagagcttgcaactttccccttcaagctatgcttcctttagtcctcactttctccattttcatctccagcactgggcacagtatcttagattccaatcaatgttgtttaatgaataagcgagtgcacctaacactgcatgtttattgttgacactgctcaatcagcattttttgtcacccatactatattcaaagcaaactgtaatgattcttaatgtgtgctgtctgattttgtaatctcctttgcactacatccagaagccaattttgctaaatgttgcagttttttggttgatgtggccagaaagccagagaacagctaggtgagctttgtaatttataaccaattcccttttgagtcatgaagcttagcttttgccagaattttttttttcttatgcttggaagaacaaagtgaactgatttaagattttcttcctgtggccaggcacactggctcacacttgtaatcccagcgctttgggaagccaatgggggaggattgcttgaggctaagagttcacgaccagcctgggcaacatatcaagacacctatctctacaaaaattttttttttaaatagccaggtatggtgacatgcgcctgtagtcccagctactcagaagactgaggcaggaggattgcttgagtcctggaagtcaaggctgcagtgagctgtgatcatgtcactgcactccaaccttggcaacagagcaagacttggtctttaagaaaaaaaaaaaaaggattttatctatttgtgtttttttatattggagaagcagcttaaacctggactagcaccataggagaagaggttcccttaatccactactgggtcaatagttacggaaaaatacaagaaatgactatgatacaggttctaaaataccacttatgctacttttaactcattataaatactgggagcacgaaaacatgcaccagagaatacaaaccagaaaataatttggggcctggtgtggtgtctcacgcctgtaatctcagcactttgggaggcagaggtgggcagatcacttgacgtcaggagtttgagacgagcctggccagcatggtgaaaccccatctctactaaaaatccaaaaaaattagctgagtgtggtggcacacacctgtaatctcagctacttgggaggccgagtagtgagaatcacttgaacctgggaggcggaggttgcagtgagccgagatagcgccactgcactctagcctgggcaacagagcaagagtccaactcaaaatagtaaccataataatttaaaaatagaatatgcagttttatatagatgtgatcacatgtacactcagcaacgggtctggagaagaagcctaacaacacatttagttccctctgcttgaatcccccttcagtggagagagaggtgaggtgtaaatgtttaacagctggcctgcttgagggaaaaatggcctgatttgaagtgcttatcagtttccatggtgtgaatacccccattactgctctcaagtgaccaacatgacagcactgaacagagttaggaagggatgggttgtagcgtatcattatataatatttccaccagccagatagagtggatgtaaatgacctcgagcacacagacggtagtaaaatgtagtgaaacaaataaaaagttatgaatttggagtatttataagctttgttttaatataatttatttaagtttatataatttaatttttagtagtggccggatttaacaatgactcacaaaattcctgaatatttaacagttggggtgagccaacttcagcacaccactggagagcacccatagggtgaattggtaaattctgttcttttcaacaaatgtgtaccgatgataacaaagtagcatgggccttatttaagcaagcctaggttcagctccttggtctcctaccagccactgacatagagcaagatatttgacctctctgaacctgagttttctcaccccaaaaattaggaatcaatctttacaggattattttgaggattaaatgagataaagtatgtcaaaagctaggagcgtagtggtacttacagctttttcagtcttccttggggaggatttgtaaactcattattctcgattattttaattgcttactctttttcctcaggaaggtctccaaaccctacaggacaaataagactcctatctttctattttcttgctagttacaagctgtttctttatctgtgctgttatgatatagggaaaaagtgaaaatctactgaactaaggtgatggagagaagtcatagacaaataacaatagagtattccttgtgatatcaggcagaatcaatgttggaaaagcattgagatttaaagagggcttgataactcttgttttggtgtttgcagaaaatttttcttatggctttatgaaaatatcttattttgaaagataacaatcaactgtgtctttacggttgaatattacaattacaaaagcataattattccttattttgttatatttcctaacatcagaaatagatggattgatttttaaagaaaaagaatcagattcaatttagtctcactactcactcctttcttttcttaaaagccaatttggtatataggtgaatcttaatgtttttacaaatatattgattattttgtagaaaataagatctcatgaaataaatctcttctgacttgacaagatgacatggtatcccttcatttgtttccacaaaaattattcatttaaaaggtgagccccagttaaggattttctttttgttttagtaaggaactgaaaaatcaagagaatgtgcctgtgaaatgcacacaaagttgcttctatatgtgatataatacttaggacacctgagcttgattatatactaatgtactatgctattgattgattagtcagggccatgaattattatacttgaattactgtttgcaaggctttttaactatcttagaaaacaaactaacagtttgagaaaaagctttaacaataaatgggtgccaaaaggacgtaattcaccatctaagcagtttggtttggagaaaaaaatatattaacttcatctagtccttggggctttgtggcaataaatattgatttgatatgaaaaatagctatctactgtacttaatagtattaaggatactttacctgttaaaaagagggaaaatgcaacaaaatatgagctccagggttatgctggtgagcagatccattgtatgttaatagttttatttataaaacaccactctctatcgattttttttaaagcaggcataaagttgctgagaaagcatttcacacatgttcccattggttttcttttcacccctgatactggttgtttcgtaatactgaggaaaaagtgaaggattctagcaatgttggttttcttttttttttttttttttgtttggattggttcggtttgattttgctcatattttttttttttaaagtgcacacctgcactccttcaaagaggttaccctttttagaacatacaactttctccccacagtgcctcagtaccgagccccattttcggtggacagcaatttgtctgtggtgtgtgtgaactggagtgacaccttcctcctgaacggccaactgaaggagtacgtgttaaccgacggagggcgacgcgtgtacagcggcttggacaccaccctctacataccgagaacggcggacaaaagttagtttctgactcctgtttctcagtgtggaaggcgctctgttccccagctttacgggatgctaaatctgaaagctgaccagcagatgctcaccattaaaatgtcttggtttaagtgcccccttcttgtgaaaaagttactgctcaggataaataaggttttctttccttcccatttgcagcttgacagcactgcagttataatgcagttcaaggggacagcgctgcctccacaggactggagggtccccaggaagggataagacccaagggccagttgggttcacaaaagaaatagcacccatacatagtcaatgactaccctaaaataatacacttctagcaacttcatagattttcttgctgtatctccagtctccaaacagagccctatcaggaaataactatctccaactcatgaggacctgaataaggggtttccttaaccttccttgatatcagcccctgaaagaacaatcttgaccctctaaaatggagttccttcttcctgtttacttacatgtcccttttctccttgccttgtttttaaattgaaatgagaaaatgctttacaaggtgctaagtattttatagtgatcagcatgctcacaggaccaatgttcactatataatgaattgattaatgagtattttattttggctgtaaggtagaggtaaacagtgagctccagcattgcatgtatagtaatagaaacttaataacatttttacaaagattcagctacacatgttcattgttacagttcatggtcacctgggcagctctttgggaaaggaaggtggcctgatggttgggagacacaggttctacctggccaggcctataaccatctgtgtgaccttgcaagggtcacttccctcaggttcctggccattggaagagcaatttagaccatgtgatttctaggatcccttttgagctctcctgttcagtaagaaactctaggtcatttagtggaaagtacacctgtaaattttaaaggaaggatttaaaccgtgtgcagaacaagatgcgctttgtgtattaccctttactcgtctgatgttcttttcctttgctgtataagctctaattttccttagctctattacttatggataggctattattacactaatgatagctttttttcttaaacattttaaaattagaagtaattttgaatattatataaaacgtcataacttgctttggaatcctatttttcatgctatgatgcattgctcttttaaaagcatgtgccctatttgtaggtgttgaatgaacaagtcatttaccagttcttccttttgtctagccttctttttccaggtcatctgcacgactgacgaaggaagtgttaagacgccgttgatccaatatgatacctctactggacttggtaaacaactcatattatacttggcgtagcacctattcatcttcctcaagaaacacacatatgtttgtttatacatacttggagtcctaatatattagcatagactatacagaagaaattgtgccaagtgttgtcagagtttttttttttgttttttttttgttgttgtttttttttgagacggagtcttgctctgtcactcaggctggagtgcagtggtgcaatcttggctcactgaaacctccacctcctgggttcaagcgattctcctgcctcagcctcccgagtagctgggattacaggcacgggccaccacacctggctaactttttgtatttttagtagagacatggtttcaccttgttagccaggctggtctggatctcctgacctcgtgatctgcctgccttggcctcccaaagtgctaggattacaggcatgagccactgtgcccagccagaaattttttaaaaagtcctcatggaacttatatcaggcaaggagttacaatacactctttttttttttttttttttgagacagagtcttactctgttgcccaggctggagtgcagtggtgcaatctcagctcactgcagcctctagctccaggttcaagcgattctcctgcctcagcctcctgagtagctgggactacaagtgtatgtcaccacgcctggctgattcttgtatttacagtagagatggggtttcactttgttggccagggaggtctcgaactcctgaccacaggtgatccacccaccttggcctcccaaagtgttggaattacaggcgtgagccactgcacctggccagaatgtactcttaaaatgccaaatattgaattgtaaatatggaaaagaccagagagctcaaactaaatttttctcctaaccacaaaccctgtcaataaagaattgtatgacttcgcgtgcataaaggtgatttacagaggaagttagaggagagatcagaagaagaaagaaaatattcagccaattcatgttgatcataatgttaatattctagattcaaagcctagaatgataaatttggaaagtgtcttttattctccataaaagattatgattgactgttgatatcgggtaatttagctcaacgggtacaattttaatttttaaggagcatcttttaaactgagttttactcatagtctctgaatctaaatttgtgatactttataaaagcaaattagagaaatgccaaatcttttccactaaaacagattcgggattgatatcctattttaaattccagtaattaatgatatatcaaatttgcatgtatagagtttttttttgaaaaataaacatgtccaaaatttctgaaacacaatttaaaaaaaaaattttttttaatttttttgagacagagtctcatacatgatgaaacatgtatattattgtcaaggatagtttcaatttgtaaaaataacgtattattctatgtttccaaactttacatgtctggatgtcatataaaatttcctacaacacttaattcttctcatacggcttatttcatttaatagcagtggtaggatagaacagatctcatttagtattctgttagcaactccaatatttccccaagtggacaagtggaggtataagggacacaggaatttatccaggaatgctctgctagcttgttactgggatgagaacaccaacacagattttctattgacttctggcctgggactttttctttgcaatggtttgccaagttaagtacgcataggaatcacctcatgtgcttgtttattgtagtttcccgggcctctggcagagattcagactcaaggaggctcagaatctgctctttaaataagtcctgtccagtgattctgacacagggctcagaaccacgtgttgagtgatgccggaaaaccaaggttgctcgccttctaagccctgccagtctagtttccttggtgaatgggaagtgtgttgttcctggaggcaggccatcaacagagacggatttactctgacactggctgtggtttcggttttctttggatctgaggcccagccaccagagtttcaaaccctgacagtgaacctcccatgtgatgcacaggtagagtcccttaaggtgaaggggtacttcaaaaagacagaagggaagggataaagggacaccatcctgatctcgaggtcttcataaaaaggagaaatcccccgttggctcatgaatacgaattgaggtttccactgtgtctggaggccgggctttgggtagagcagaggggaagaactctgaggattgtgcaatgctctggcagattccaagatgtgctgcccaactaatatccatcgtcagttctaattttcatgatgtaacttttttaaaaacattcctgttcccttgcctgaaggcagcctccaagcaggagagtggcagagacctcattttcctctgactgttctaagggctatttcccttttgaggcttccctcgggcaggctgccctcccttcccctgcgtgctgtggagcaaggggcccactgggcccatcagatcagtttctggagttacagccaacaagttgttttctctctgtgccacacacagaggaaacaactcttttagtgtgcaacctaggctggtttgtttttaatcaaacaacacacattggttcctaattaggggaatttcgacctgctggagcttgattggagtgttgactcaaccctttattttagagatgagaagcaaaggtcagagtccaacatttaatcacagagctgatcggcagcagagttagggttggcaaagtaatatccctcctcttacggagttcaaagtttagttttagtcaccatctgttcctgcctttaatagtttcaccccagttctgaacttttttcctttaagtctttccctgctagtgtgagtgtgaagtaccacgcaggcccatggagttctagaggtgttgaaaagggggagatttgtccagtgagtgagtgggctttgcagttgtgtctgcttgttcttctgacctggctgtgggtattagatttagatgagcagctctctggctcacatctccacaccagcctgtgtggccgctgcatcagatccacaggtttctgtgctggccccagcagtggctggatgggagcagatctctggccaccccacccccacccctgccgcacccctgcttagcttgccaagctgacaacataatttcactgccttcgcctatcctgcatgattcttgtcagcctctctcctatcttccccacaagacttaataaacctgcctggctgggtgcggcggctcatgcctgtaatcccagcatgttggaaggccgaggcaggcggatcatgaggtcgtgagattgagaccatcctggccaacatggtgaaaccccatctctactaaaaatacaaaaattagccaggcatagtggcgcacacctgtaatcccagctacttgggaggctgaggcaggagaatcacttgaacccaagaggcagaggttgcagtgagcggagatcacaccactgcactccaacctgggtgacagagcaagactccatctcaaaaaataaataaataaataaataaataaataaataaataaaaataatcctacccacccttcatccctgtaaagctctaagcataggacctggcaccaggtacattcttgttaaatgtgagctacttttattaatactaacttcatgtgcagagactcacaccaactgaactctcaatgtgtgaacgccaagcaaaggtaagtggctccagtgctaaaagatttctttccataggaagctttcccagtgcatttgggtgatggtttgctgagctttgctctttaacagagaggccatgtaaagacaacatggtagcaaacacaggctgttaatatcataatggaaaatggaatctgatgcttcaaaatccagtttgcacgaagtatcaggaattggactgttgcatgaagcaagtacacctcagatctccaaggagtgattttgtttgtgactctgcagcaataatagtaagggtcccagtccctcatgagaatccaagcaaggactttgctcccaagacacacagctatgaaacaggtgaccctcaaggttactttggtaacctcttttaaaaattgctccccacactcccatctttcccagggatttgtcaagacagtggtgatttccaacctgagcagcagcgccagaagtgtcagcaaggcctctcaagggctgtaagcatctcgttataacccagcaacctgctgaaccattaccccaggctgcacacaagtgcaaacaagcagtaagagacaaactgctttctgctttcaactcctctctaatttactatcaaatagcagggccagagatgacaaaaatgctttctgaaataacatttcccctttctttctctgggttttgcaggcttggtcctaacaactcctgggaaaaagaagggatcgcggagcaaaagcacagagttctacagcgagctgtggttcatagtgttaatggcgatgctgggcttgatcttgttggccatttttctgtccctgatactacaaagaaaaatccacaaagagccatatatcagagaaagacctcccttggtacctcttcagaagaggatgtctccattgaatgtttacccaccgggggaaaaccatatggtatgtttgtagaggtgtggccccatttccctatcactggactagaatacttgttttccttctgagaaaaatgtgtcatagccatggtaacaaggaattagatgtaagttatgtttcactaagtgtggggaccaagagaggctaaccctagaacagctttctcaactttggctgcacattagaatcacctggaaagctttaaaaaatatcactgcctggacttcatccgagaaattctcatatccttggtcttgagtagggcctgaagattggtattcttttcttcactccaaaactgattttaatgtgtaactagggatgagtatctctgccctgtaattgtaagccagggcctggtggagaagagttgtatgttgagattacctggggaaattataggttgtattactgtgtaatttggtggcggggaatgaacattaaaaggcggagatggggaggaaggggctacagtgctagtggtgctcggtctgtcctctggtcctgacaccctgtgccacagaggatggatggctcctcttagctatagaccactcactcccaaaataggaggtccagtaaaggtctagtgggagagggccccatcacttggtattacaggacagtcattgcccagagcactcattgaagggtaaaaggtgatttaattccatggtgcagtctggtgtggggctatgtctacctggaggaggaaaggctgcgttttctaatcctcatcaggtacccatctgttcaccaaagctgggcgcccacagggctacgtctccctgaggaggtgccttttttccagtttgcactaaggttctatattagctagtggctaccctaggcagtactaaaattaagcacagaagcctggtcaagctgcttacacttcaacatttaaaaaaacagcagtgagtgaacacagcagcaccatctgccttccagatctcttcacttttccagcactcagcaatgaatgaccactggttaagccccaacatagctggatcagacctaagtagcaggagtgttgggagcacaaaagggcagtgggccctccgaggtccacggtttgtggtttttgtgggaagtagcaatgggacaatgacgtggtggtggagaagcaaagaaggcactgcccaacaccatcagggccttggctctctactcacatctgtcccactcctctactcactcatcctcctcggagcctccttcctccctgagcccatcagacaagctctaaccacagggccattactgctgctgctccttgggtggctcacactcttgcttcattcacatctctgcacaaatgtcacctcccattctatgtaaaatttcctagccccttaacccacttcttttcttttctatagcatttaccacataacactaagtcagatatgtttgtctgactcctgaaatagaaggtaagctcccaggatcaatgatcttgtgggcctcttcctgttgtatgtgccccgggacccagaacggtgcctggcatatcataggcactccacgaatgtttgttgaatgaatgaatgtcgagtgatcacttcgaaccatgggctgtttgctcctgttcagtgaatagtcattaggagattctcactgaagagcagatatttcaaaatttttccttgttaaagaataactttctttaaggagcccatgttcctagaaggtgcactgctgctggaggaaggcagtggaagagagaaaagaaggcaggagagatctgtttagcctgggagatgagctaaactgaaactagggtctatggagtgcatggagtggtgaaagggaggttcccaagcactgctaggcacatctactgtataatgtgaggtgcggttacaggaaagtgtacccacataccagcaatgtccagaagtcatttcagtgatactttctcctgtcctttgacccagtccctataggcaggcacctctgtgtcagaatcctccatgaggaagaacactgtcttccttacttggttaacttagtgaccagaagacactcccatcattcttgtggagatgttatgttactctggatataaccccattgctcagggttttaatgagtcttgttaagcttcgttttgtcaaagtgaggaccatgaactatctgcatcagcatcacataggaggagcaggacctgaagttctgagggagaaactcaataatctgccattttaaccagaacctcaagaagtctgggccaggctcggtggctcacacctgtaatcccagcactttgggaggttgaggcaggagaatggtgtgaacccaggaggcagagcttgcagtgaaccgagatcacgccactgtactccagcctggacaacagagcgagactccgtcacaaaacaaaacaaaacaaaacaaaacaaaaaaagaagtctgatgcacagcaagatttgagaacagctgaaaatgaaataataatataatacaaaacctgtatgcagtgtactgtttgataaccagtagaaacaggtggtgggagggtgctggttagaccttgctgtcctgacaccacacaggctaagccgcctctggggacagacttaggcttcagctgagaaaagcggacaaaagaatgtaaacaccctgttcctgcacaccctttaccatcggggaaatgcacagtggcacccaactgattctttcactgagtggccaagactgagtcaggtgtgaggatgggaaggcatagagggactggctggctgccaggggctctgggcccagggaactggctcatcctcagcagggaagccattcattgcaggcaggtctcagcagaagtgaaatctgggatacaccagggcaccgggtggaattcccctgagcctgttgaatcataatttaatcctatccagttgacagtgtatttgcaagtcttcttctgttgctttttacaaatatttttaaaccaaactgctctcacaaagttggagaccatgagagacattgtcaaaaattagccaaactaaagagagtacaatttgtattagtagagcaaaatgaagtccctgttggtgactgtgggctcctcatctactcaggtgggaaagaatccagtcaaggggaagaatctgaataggaacaagccagattcacctgctcagttttccagattgactgtcttttcacttgagtaggtcaatgagctatgcccctgcaacacccacccacacacacacacacacacacttctccccctcatgtgacaagctctggtttcagtgctgctgtgaccctcttccaagcacccgtcttgtgaacaggtaagataccctttgaacatcagacccaaactggcaaaaggattttaggctatactctgaatggagagaaataggcagaggtgccaaggaatgagagtgtcttttgtatttcatcaacatttttcaagaccatacagtatacagtatagctaagtttaagttttgcttgttatttaattactggtttgaagatcctttcattccctgcaatactaaacaaatactggcagtggtacttaccttagacactaatcaattaatttccactcaccaaggtttttttttttttaatttgtttgtttttgagacagagtcttctgtcatccagactggagtgcagtggcatgatctcgactcactgcaacctccagctcctgggttcaagcgattctcctgcctcagcctcctgagtaactgggactacaggcgcccgccaccatgcctggctaatttttgtatttttagtagagacggggtttcaccatgttggccaggttggtctcgaactcctgacctcaaatgatccacccgtcttggcctcccaaattgctgggattacaggcatgagccaccgcacccggcctcactatgaagttttagttgcaaaacccaactttctctctctcatatatatatatatatatatatatatatatatatatatatatatacacacacacatacacatacatatatattcacatatatatgtatatatacacacacacatatatatacacacacatatatacatatgcaggtatgtatcctaggatatatatgtacatcagagcagtattaaatatgggtatgataatgctgtcattggagaaatgcaaggaatgtgtttaaaactgttccaaacatggactgatgctgccatttgttctcagtttgactctgtggctgatatatctgatgtgtcaagcaatgtcaccctaaaaagttacaccatgcactttgaggtacctctgtgtgctgcatgaatgcatgatcttttgcatggtgtgttgactgcacagtgaaaagcaggaacagatcattgatgacttccatatatccattccttggaaagctgaacaacatgagtgaaaactctactgaaaaaagaaaagaaatgggaggccgaggcgggcggatcacaaggtcaggagatcgagaccatcctggctaacacggtgaaaccccgtctctactaaaaataccaaaaattagccgggcatggtggcgggcgcctgtagtcccagctactcgggaggctgaggcaggagaatggcgtgaacccgggaggcggagcttgcagtgagccgagattgcaccactgcactccagcctgggcgaaagagcaaaactctgtctcaaaaaaaaaaaaaaaaaaaagaaaagaaaagaaaaagcagaaacatttcattgattggaccagctaaatcagagccctcagatatttagagcaactatagtttatcttacggcgcgttctaggtctaaattatgtagtgactttttctctctgatgttaatatcagacctgatgtaatttggaggctggaatcctataagaaatggaggaatatggaatgagaaatgagggagggaggagtcaatttccctacacaaatccaggacttttaaagtgaaagacaaacggagctcacatagtggaccaccatgaaataatattgttatctttggctgttctgggggaggagtgttctcaagagggaggctctgtgctgacatgtatgaagaagataccttgttcacccatcatccgtctgccttgccccaccactttgcaatgcagcaagcccttgccccacagggaacaacagccagagcaccagtgcatgagctctctaggtgccgaaaacactggccacctaacttgagtattagctcatcatctcatccttcttaccaagaaacccagggtcaccgtgttgtgggtgctcatagctgctaaattctgtaggtgacagttgttcccttcattgacaatgtgacaattgtcaggagacagtcattcccttcactgacaatgtgtgagacacaattctctgtcatatttcaagcccatattctttatatgtgaaatactcacagcaacttccttctcaggggttagccgataccaaaattccccggtctgggacacctgtgagtatccgcagcaaccggagtgcatgtgtcctgcgcatcccgagtcaaaaccaaaccagcctaacctactcccagggttctcttcaccgcagcgtcagccagctcatggacattcaagacaagaaagtcttgatggacaactcactgtgggaagccatcatgggccacaacagtggactggtgagttggtttcctcatacagggcctttgctaaatatcccagaaaaaatattggtacagagctgcctgtacttcaccgaatgctgccccatggcactcgcctctgagcacttagccagtgaggtagtaacaaccggtttactaatgttacttcagttgtttgataagcagggtagaaactttgtcttgttcttctggtatgcaatagatgcttaaaaataaatgcttattggctagccgtggtggctcatgcctgtaatcccagcacttggggaggccgaggtgggcggatcacctgaggacaggagtttgagaccagcctggccaacatggtgaaaccctgtctgtactaaaaatacaaaaattagccaggtgtggtggtgggcacctgtaatcccagctactaggggggctgaggcaggagaattgcttgaacccaggaggtggaggttgcagtgagccgagaccgcgccactgcactccagcctgggtgacagagactccatctcaaaataaataaataaataagcagcaaacaggttatacttcatatacttggagcagatgacaggaaacattggaatgggcctaaaacaaggcataaaatacaagcacttgttttactaaaacaaaaaggtactttttttgttttgccttttcctattggtgtatgggtagacgcaaaaagaatattttgtatcaacaggtgaacatggttgctttccaaaaccttaggaaatgatgacaaatgagggtgttactatttataagcttcatctttcataatttcagtccagtgggtacaaatcattggctctttgaaaggtaacctcttcgtgatataacatttattatcagtctctgagcggctacaataacaaaaatcctagaatttttgccaactatcaaatttcattgtgctaacttcctagatgcccgctgcagtacctaccattccactgggcctgttagaaaataaacagataggccaggcacagtggcttacgcctgtaatcccagcattttgggaggccgaggtgggcggatcacgaggtccagagttagatagagaccagcctgaccaacatggtgaaacctcgtctctaccaaaaatacaaaaattagctgggcgcggtggtgcgcacctgtaatcccagctactcaggaggctgaggcaggagaattgcttgaacctgggaggtggaagttgcagtgagctgagatggccccactgcactccagcctgggtgacagagcaagactctgaaaaaagaaaaaaaggaaaaaaggaaggaaggaaggaaggaaagaaggaaggaaggaaggaaagaaggaaggaaggaaggaaggaaggaaggaaggaaggaaggaaggaaggaaggaaggaaggaaggaaggaaggaaggaaggaaggaaggaaggaaggaaagaaggaagggagggagggagggagagaaagaaaagaaaagaaacataaccagctaggaagttagctcctgtgtttactcctctggggtaaaattattcacctccacttctttcaatcatctgcttctgtttttggatttgctctcatctttctcctccaagttctcacttttccttcactgaaaagttgatgacttccatgaagcctttcttgactaatagcaaataataaagggagttcgctggacccaggttccctaacactatataaaaaaatgtaccatccttctggcctgttcagaatgattgtataatatatacatatatataatatgcattttaaaatcacaggctgtttgatgttgttgtaacctcaactacatgagtccatttcagatctaaagtttttaaaaggcagggataattatatttggttgaaacaatgaattgctaactgatcatttttgacatgcaaaacagcaattgctatacattcaacataatacattgaaagttcagatgaattattacatctaatcttcacaaactgtaggaagtaggttctattatcatcctcattttttacaaaaagaactgaggtttagagagatgagtgatttaatgagagattacacagctagcaattatttttatgggtttgggttcttaaaaacatcatctgactacagagctcctatttgtaactattatactgtattgtcatttttgcttgctttttacggtactaataatgggcaatgtgcaaagggactcaataacaagcttttgaaggtgccagtacttggcaagttatctgtttattataacattataaccaacattactaaccctatttgataaatacaaaatacagcacaagagtgggaagaaatggagcacaaatagctagcattctgcctcttccatttaccgtttgaactaaatccatatatatgtgtgtatatatatgtatatatacagatcaccagaggtcaggagttcaagaccagactggccaacatggtgaaaccccatctctactaaaaatactatatacatacatacatacatacatatatatatatagtgtatatatacactaaaatatatagtatatatatgtagtgtctatatagtgtgtatatatatactaaaaatatatatatatacccccagctaatttatttttatcaagtatatatgtacacacacacacatcccactctacagatgagtagactgaggcttctgaggcttaggttaaaatatgacacaatataaccctcaaatcacatatacattttgaattagtctatagttcatgtgtgcatgtgatgtgatcctttcaataagagaaatttaaggcaaggtctgttttagaccccaccatggtgttgagaataaaaaagcctttaatacttattactttttacacttaattgatataactataaattgatagcaaatactattgatagcaagtatgtagccaatgatgattggcttatttttcagtatgtggatgaagaggacctgatgaacgccatcaaggatttcagctcagtgactaaggaacgcaccacattcacagacacccacctgtaaaggatggaaacccagaagacgtaaccctggaatgcaaggtctgcacccatttcctcctgggttatcactcacacatcataaatgctgaaaagccattgtttattatcctataattctttaaagaaatgatgactgtttttgaaagtgttccttcctaatagaggtctaagaaatgatatttttctcatcttaaatgagagagaatattcatatgaaaatacttgatttgctcttattttgtagaagacaaagaagtatgtaattgtcacttggttctgtttggcagtgatgctcctggttaactgaataatcagtggcaatttcaagatggctcacagttgttagaagtagtaagttagttactggctcaaaaatgattctgttgaaaggatgtcactgctgttcatttctatctgccatttctgtcagggttgacacaatcctgcaagaatagttattctaatgatcacagctgctaaatgaatcccaaactttgcaccaggtcgacaaacttttctgaaggttctatttatttaccatacatagggttacttaccaaactttttgacaaggctgaaggttctatttatttacaatacatagggttactcaccaaactttttgacaaggcaacacataacttacacataaatgtctctgttcttgcatttatgaattttccaaaaatctaaggagtaaacagcttatttatacattttgaggagaaaacaaagtgtttcactaggaacacctctacttgaaccaatgtttttatttcatatattttatagttttgaaactagtttctcataaaattctgtcaattcactgaatatcagagaatactgacatcttcaacctagcacatttcaaatggaaactactgttctatttgcaatattaggctgcgtgaaattttaaaaggaaaaatgtatctgttccttctagcattaacatatatacatgtagagacaagactatacctatgtgtatatatatgtatatcatgtatatattactctgcactatatcccttctttttggagaactagccattattttagccacagaatcagtaagaacagatgatatgcaacagtaccaattacggttcaaaaatgtctgtcacctgctctagttggattacaaagtcattggtgaaagtcctatggcaagaaaaattttcttgcaaatcatccacataaaatcagatatttaaatttgttcttcatggaaaacagagtaagaaaacctcttgtcttccttcatccttaaaggtctttgtgaccccaggaaaatattgactctgtctaacacacaatagtcacaatactttttgtgaatctacaaccagagacaggcaaaaacttgtaaagtaagggatagtcttacttattctgcctgaaaacaatgtattaccccagggcccaacagtaaaagattgtggactttttgggtattgagatttcatctagctctgtgagagagcagctcctcagactgaccaactcctagacaaagtttgccaaccataagtgtcaaaagcacaggccagtattaagcagaagttctaccaccttattagaactgctataaacaaaagcatctgaaataattgtgcacatctggcagtgactgtagaaaatacgaaatatatatttctcgccaagtttttatactttctgaaatgaaaacataggattgactagtttactggtttttattcccatatgccgattctgggacaataaagttgtttaaagctggcacaaataagcattaaccaaggctgtgtccaccttctgtgagctacttaaggtatataggaaaggagtggtcacaaacttgcatcctaatccttggtggactcttctaagaatacagtttgctagtcacaaagaatagtctacaaatatgctttgctaggttcagaagattgagtttatcctgatttttgaaaaattaaccaggtatctttatcactgtgtatttttccaagcacagtataaaattttaacaacgcacaaaaaaatacagaactgcaggggattttatcttggatcattatccatttaatcatctaattagacatgaactcagttagctgaatcatttacattttgactccatagcttagggcagacagaagcctgtatggcttctgcccagaactctgtcccctgctacatgtctaagtttacttgtatttatttcagagaagaactctaagatgttgctttgctactttaagtggtattgcgtgccaagcctctattatacaaaccatgcagactcgcctctagagattctgattcggttgatctggggtgtgtggctgaggcatcagtactttttaaagcttccaggtgttctaatgttgagacccactgatgttccacaatctggaagaaatcatgtacaggaataatatgctatgcacagggactatgctccttggctcaccccttctcccttataaacaatgagcagttcttgatgaacctctttaaatttaaatctcctgactcacattttaccaattgtacatgccacattctcagcttacgaactaccatgttttgttattcttaatatcaactgtttggtaagagtacagttgtttttatacactctaagaaatgtgtttataatctactgtaatttccactaaatggaacccaaatattaatgttatggtaccatatactgatgtaaaaatcatgctggcatccatgaacacaccggtaaataaaacatagtccaagtggaagaattcattaataaggaacttttaattatgtcacaaatgaatagttggtttccaatgcacaaatatcatgtaaactaatctaaagatggtttgcttaataaatatttgaatgtgacc

SEQ ID NO: 5267 - RNA, 100 nt, synthetic construct
  source 1..100: mol_type = other RNA
nnnnnnnnnnnnnnnnnnnngttttagagctagaaatagcaagttaaaataaggctagtccgttatcaacttgaaaaagtggcaccgagtcggtgctttt

SEQ ID NO: 5268 - RNA, 96 nt, synthetic construct
  source 1..96: mol_type = other RNA
nnnnnnnnnnnnnnnnnnnngttttagagctagaaatagcaagttaaaataaggctagtccgttatcaacttgaaaaagtggcaccgagtcggtgc

SEQ ID NO: 5269 - RNA, 114 nt, synthetic construct
  source 1..114: mol_type = other RNA
nnnnnnnnnnnnnnnnnnnnnnnnnnnnnngttttagagctagaaatagcaagttaaaataaggctagtccgttatcaacttgaaaaagtggcaccgagtcggtgctttttttt

SEQ ID NO: 5270 - skipped

SEQ ID NO: 5271 - protein, 9 aa, unidentified
  source 1..9: note = Homing endonuclease sequence
LAGLIDADG

SEQ ID NO: 5272 - RNA, 20 nt, synthetic construct
  source 1..20: mol_type = other RNA
ctgagccatggaggttacac

SEQ ID NO: 5273 - RNA, 20 nt, synthetic construct
  source 1..20: mol_type = other RNA
ccctgccagtgtaacctcca

SEQ ID NO: 5274 - RNA, 20 nt, synthetic construct
  source 1..20: mol_type = other RNA
atttgttcactgagccatgg

SEQ ID NO: 5275 - RNA, 20 nt, synthetic construct
  source 1..20: mol_type = other RNA
aaattctgcaatcctcactc

SEQ ID NO: 5276 - RNA, 20 nt, synthetic construct
  source 1..20: mol_type = other RNA
aattctgcaatcctcactct

SEQ ID NO: 5277 - RNA, 20 nt, synthetic construct
  source 1..20: mol_type = other RNA
ggtgtcacactgaagtcctt

SEQ ID NO: 5278 - RNA, 20 nt, synthetic construct
  source 1..20: mol_type = other RNA
gttagatgtcaccaattgta

SEQ ID NO: 5279 - RNA, 20 nt, synthetic construct
  source 1..20: mol_type = other RNA
acagtcacaggccttacaat

SEQ ID NO: 5280 - RNA, 20 nt, synthetic construct
  source 1..20: mol_type = other RNA
gacacagctggatccctccc

SEQ ID NO: 5281 - RNA, 20 nt, synthetic construct
  source 1..20: mol_type = other RNA
acacagctggatccctccct

SEQ ID NO: 5282 - RNA, 20 nt, synthetic construct
  source 1..20: mol_type = other RNA
attacagacagtcccaggga

SEQ ID NO: 5283 - RNA, 20 nt, synthetic construct
  source 1..20: mol_type = other RNA
cattacagacagtcccaggg

SEQ ID NO: 5284 - RNA, 20 nt, synthetic construct
  source 1..20: mol_type = other RNA
tagcattacagacagtccca

SEQ ID NO: 5285 - RNA, 20 nt, synthetic construct
  source 1..20: mol_type = other RNA
ttagcattacagacagtccc

SEQ ID NO: 5286 - RNA, 20 nt, synthetic construct
  source 1..20: mol_type = other RNA
actgtctgtaatgctaagac

SEQ ID NO: 5287 - RNA, 20 nt, synthetic construct
  source 1..20: mol_type = other RNA
ctgtctgtaatgctaagaca

SEQ ID NO: 5288 - RNA, 20 nt, synthetic construct
  source 1..20: mol_type = other RNA
gcactgtctcccttcaacat

SEQ ID NO: 5289 - RNA, 20 nt, synthetic construct
  source 1..20: mol_type = other RNA
tctgcaagcccaatgttgaa

SEQ ID NO: 5290 - RNA, 20 nt, synthetic construct
  source 1..20: mol_type = other RNA
gagacagtgcaataaatgtt

SEQ ID NO: 5291 - RNA, 20 nt, synthetic construct
  source 1..20: mol_type = other RNA
tggagggaaacttctaccta

SEQ ID NO: 5292 - RNA, 20 nt, synthetic construct
  source 1..20: mol_type = other RNA
ccagtcttatcacagttgca

SEQ ID NO: 5293 - RNA, 20 nt, synthetic construct
  source 1..20: mol_type = other RNA
cttgcaactgtgataagact

SEQ ID NO: 5294 - RNA, 20 nt, synthetic construct
  source 1..20: mol_type = other RNA
gataagactgggacaataaa

SEQ ID NO: 5295 - RNA, 20 nt, synthetic construct
  source 1..20: mol_type = other RNA
agagtaagattggcccccta

SEQ ID NO: 5296 - RNA, 20 nt, synthetic construct
  source 1..20: mol_type = other RNA
gtaatcagtgtgagcctcac

SEQ ID NO: 5297 - RNA, 20 nt, synthetic construct
  source 1..20: mol_type = other RNA
atggtcaaattgtacctgtg

SEQ ID NO: 5298 - RNA, 20 nt, synthetic construct
  source 1..20: mol_type = other RNA
gcagtgttgaaaattgtcaa

SEQ ID NO: 5299 - RNA, 20 nt, synthetic construct
  source 1..20: mol_type = other RNA
ctcacaagcaatgccatagg

SEQ ID NO: 5300 - RNA, 20 nt, synthetic construct
  source 1..20: mol_type = other RNA
tctcacaagcaatgccatag

SEQ ID NO: 5301 - RNA, 20 nt, synthetic construct
  source 1..20: mol_type = other RNA
aggaatcacactcacacatc

SEQ ID NO: 5302 - RNA, 20 nt, synthetic construct
  source 1..20: mol_type = other RNA
gatgtgtgagtgtgattcct

SEQ ID NO: 5303 - RNA, 20 nt, synthetic construct
  source 1..20: mol_type = other RNA
tgtgtgagtgtgattccttg

SEQ ID NO: 5304 - RNA, 20 nt, synthetic construct
  source 1..20: mol_type = other RNA
ggtcccaggtaatgtcccca

SEQ ID NO: 5305 - RNA, 20 nt, synthetic construct
  source 1..20: mol_type = other RNA
gattccttggggacattacc

SEQ ID NO: 5306 - RNA, 20 nt, synthetic construct
  source 1..20: mol_type = other RNA
attccttggggacattacct

SEQ ID NO: 5307 - RNA, 20 nt, synthetic construct
  source 1..20: mol_type = other RNA
attgggtcacaaatggtccc

SEQ ID NO: 5308 - RNA, 20 nt, synthetic construct
  source 1..20: mol_type = other RNA
accatttgtgacccaatcag

SEQ ID NO: 5309 - RNA, 20 nt, synthetic construct
  source 1..20: mol_type = other RNA
gattaggcacacacaggcac

SEQ ID NO: 5310 - RNA, 20 nt, synthetic construct
  source 1..20: mol_type = other RNA
cttgacgattaggcacacac

SEQ ID NO: 5311 - RNA, 20 nt, synthetic construct
  source 1..20: mol_type = other RNA
ctgtgtgtgcctaatcgtca

SEQ ID NO: 5312 - RNA, 20 nt, synthetic construct
  source 1..20: mol_type = other RNA
aggtgtaatcagtgtcaacc

SEQ ID NO: 5313 - RNA, 20 nt, synthetic construct
  source 1..20: mol_type = other RNA
gacattccttttgttaactt

SEQ ID NO: 5314 - RNA, 20 nt, synthetic construct
  source 1..20: mol_type = other RNA
gaagccacaaaccagaaaca

SEQ ID NO: 5315 - DNA, 20 bp, synthetic construct
  source 1..20: mol_type = other DNA
ctgagccatggaggttacac

SEQ ID NO: 5316 - DNA, 20 bp, synthetic construct
  source 1..20: mol_type = other DNA
ccctgccagtgtaacctcca

SEQ ID NO: 5317 - DNA, 20 bp, synthetic construct
  source 1..20: mol_type = other DNA
atttgttcactgagccatgg

SEQ ID NO: 5318 - DNA, 20 bp, synthetic construct
  source 1..20: mol_type = other DNA
aaattctgcaatcctcactc

SEQ ID NO: 5319 - DNA, 20 bp, synthetic construct
  source 1..20: mol_type = other DNA
aattctgcaatcctcactct

SEQ ID NO: 5320 - DNA, 20 bp, synthetic construct
  source 1..20: mol_type = other DNA
ggtgtcacactgaagtcctt

SEQ ID NO: 5321 - DNA, 20 bp, synthetic construct
  source 1..20: mol_type = other DNA
gttagatgtcaccaattgta

SEQ ID NO: 5322 - DNA, 20 bp, synthetic construct
  source 1..20: mol_type = other DNA
acagtcacaggccttacaat

SEQ ID NO: 5323 - DNA, 20 bp, synthetic construct
  source 1..20: mol_type = other DNA
gacacagctggatccctccc

SEQ ID NO: 5324 - DNA, 20 bp, synthetic construct
  source 1..20: mol_type = other DNA
acacagctggatccctccct

SEQ ID NO: 5325 - DNA, 20 bp, synthetic construct
  source 1..20: mol_type = other DNA
attacagacagtcccaggga

SEQ ID NO: 5326 - DNA, 20 bp, synthetic construct
  source 1..20: mol_type = other DNA
cattacagacagtcccaggg

SEQ ID NO: 5327 - DNA, 20 bp, synthetic construct
  source 1..20: mol_type = other DNA
tagcattacagacagtccca

SEQ ID NO: 5328 - DNA, 20 bp, synthetic construct
  source 1..20: mol_type = other DNA
ttagcattacagacagtccc

SEQ ID NO: 5329 - DNA, 20 bp, synthetic construct
  source 1..20: mol_type = other DNA
actgtctgtaatgctaagac

SEQ ID NO: 5330 - DNA, 20 bp, synthetic construct
  source 1..20: mol_type = other DNA
ctgtctgtaatgctaagaca

SEQ ID NO: 5331 - DNA, 20 bp, synthetic construct
  source 1..20: mol_type = other DNA
gcactgtctcccttcaacat

SEQ ID NO: 5332 - DNA, 20 bp, synthetic construct
  source 1..20: mol_type = other DNA
tctgcaagcccaatgttgaa

SEQ ID NO: 5333 - DNA, 20 bp, synthetic construct
  source 1..20: mol_type = other DNA
gagacagtgcaataaatgtt

SEQ ID NO: 5334 - DNA, 20 bp, synthetic construct
  source 1..20: mol_type = other DNA
tggagggaaacttctaccta

SEQ ID NO: 5335 - DNA, 20 bp, synthetic construct
  source 1..20: mol_type = other DNA
ccagtcttatcacagttgca

SEQ ID NO: 5336 - DNA, 20 bp, synthetic construct
  source 1..20: mol_type = other DNA
cttgcaactgtgataagact

SEQ ID NO: 5337 - DNA, 20 bp, synthetic construct
  source 1..20: mol_type = other DNA
gataagactgggacaataaa

SEQ ID NO: 5338 - DNA, 20 bp, synthetic construct
  source 1..20: mol_type = other DNA
agagtaagattggcccccta

SEQ ID NO: 5339 - DNA, 20 bp, synthetic construct
  source 1..20: mol_type = other DNA
gtaatcagtgtgagcctcac

SEQ ID NO: 5340 - DNA, 20 bp, synthetic construct
  source 1..20: mol_type = other DNA
atggtcaaattgtacctgtg

SEQ ID NO: 5341 - DNA, 20 bp, synthetic construct
  source 1..20: mol_type = other DNA
gcagtgttgaaaattgtcaa

SEQ ID NO: 5342 - DNA, 20 bp, synthetic construct
  source 1..20: mol_type = other DNA
ctcacaagcaatgccatagg

SEQ ID NO: 5343 - DNA, 20 bp, synthetic construct
  source 1..20: mol_type = other DNA
tctcacaagcaatgccatag

SEQ ID NO: 5344 - DNA, 20 bp, synthetic construct
  source 1..20: mol_type = other DNA
aggaatcacactcacacatc

SEQ ID NO: 5345 - DNA, 20 bp, synthetic construct
  source 1..20: mol_type = other DNA
gatgtgtgagtgtgattcct

SEQ ID NO: 5346 - DNA, 20 bp, synthetic construct
  source 1..20: mol_type = other DNA
tgtgtgagtgtgattccttg

SEQ ID NO: 5347 - DNA, 20 bp, synthetic construct
  source 1..20: mol_type = other DNA
ggtcccaggtaatgtcccca

SEQ ID NO: 5348 - DNA, 20 bp, synthetic construct
  source 1..20: mol_type = other DNA
gattccttggggacattacc

SEQ ID NO: 5349 - DNA, 20 bp, synthetic construct
  source 1..20: mol_type = other DNA
attccttggggacattacct

SEQ ID NO: 5350 - DNA, 20 bp, synthetic construct
  source 1..20: mol_type = other DNA
attgggtcacaaatggtccc

SEQ ID NO: 5351 - DNA, 20 bp, synthetic construct
  source 1..20: mol_type = other DNA
accatttgtgacccaatcag

SEQ ID NO: 5352 - DNA, 20 bp, synthetic construct
  source 1..20: mol_type = other DNA
gattaggcacacacaggcac

SEQ ID NO: 5353 - DNA, 20 bp, synthetic construct
  source 1..20: mol_type = other DNA
cttgacgattaggcacacac

SEQ ID NO: 5354 - DNA, 20 bp, synthetic construct
  source 1..20: mol_type = other DNA
ctgtgtgtgcctaatcgtca

SEQ ID NO: 5355 - DNA, 20 bp, synthetic construct
  source 1..20: mol_type = other DNA
aggtgtaatcagtgtcaacc

SEQ ID NO: 5356 - DNA, 20 bp, synthetic construct
  source 1..20: mol_type = other DNA
gacattccttttgttaactt

SEQ ID NO: 5357 - DNA, 20 bp, synthetic construct
  source 1..20: mol_type = other DNA
gaagccacaaaccagaaaca

SEQ ID NO: 5358 - DNA, 20 bp, synthetic construct
  source 1..20: mol_type = other DNA
gtgtaacctccatggctcag

SEQ ID NO: 5359 - DNA, 20 bp, synthetic construct
  source 1..20: mol_type = other DNA
tggaggttacactggcaggg

SEQ ID NO: 5360 - DNA, 20 bp, synthetic construct
  source 1..20: mol_type = other DNA
ccatggctcagtgaacaaat

SEQ ID NO: 5361 - DNA, 20 bp, synthetic construct
  source 1..20: mol_type = other DNA
gagtgaggattgcagaattt

SEQ ID NO: 5362 - DNA, 20 bp, synthetic construct
  source 1..20: mol_type = other DNA
agagtgaggattgcagaatt

SEQ ID NO: 5363 - DNA, 20 bp, synthetic construct
  source 1..20: mol_type = other DNA
aaggacttcagtgtgacacc

SEQ ID NO: 5364 - DNA, 20 bp, synthetic construct
  source 1..20: mol_type = other DNA
tacaattggtgacatctaac

SEQ ID NO: 5365 - DNA, 20 bp, synthetic construct
  source 1..20: mol_type = other DNA
attgtaaggcctgtgactgt

SEQ ID NO: 5366 - DNA, 20 bp, synthetic construct
  source 1..20: mol_type = other DNA
gggagggatccagctgtgtc

SEQ ID NO: 5367 - DNA, 20 bp, synthetic construct
  source 1..20: mol_type = other DNA
agggagggatccagctgtgt

SEQ ID NO: 5368 - DNA, 20 bp, synthetic construct
  source 1..20: mol_type = other DNA
tccctgggactgtctgtaat

SEQ ID NO: 5369 - DNA, 20 bp, synthetic construct
  source 1..20: mol_type = other DNA
ccctgggactgtctgtaatg

SEQ ID NO: 5370 - DNA, 20 bp, synthetic construct
  source 1..20: mol_type = other DNA
tgggactgtctgtaatgcta

SEQ ID NO: 5371 - DNA, 20 bp, synthetic construct
  source 1..20: mol_type = other DNA
gggactgtctgtaatgctaa

SEQ ID NO: 5372 - DNA, 20 bp, synthetic construct
  source 1..20: mol_type = other DNA
gtcttagcattacagacagt

SEQ ID NO: 5373 - DNA, 20 bp, synthetic construct
  source 1..20: mol_type = other DNA
tgtcttagcattacagacag

SEQ ID NO: 5374 - DNA, 20 bp, synthetic construct
  source 1..20: mol_type = other DNA
atgttgaagggagacagtgc

SEQ ID NO: 5375 - DNA, 20 bp, synthetic construct
  source 1..20: mol_type = other DNA
ttcaacattgggcttgcaga

SEQ ID NO: 5376 - DNA, 20 bp, synthetic construct
  source 1..20: mol_type = other DNA
aacatttattgcactgtctc

SEQ ID NO: 5377 - DNA, 20 bp, synthetic construct
  source 1..20: mol_type = other DNA
taggtagaagtttccctcca

SEQ ID NO: 5378 - DNA, 20 bp, synthetic construct
  source 1..20: mol_type = other DNA
tgcaactgtgataagactgg

SEQ ID NO: 5379 - DNA, 20 bp, synthetic construct
  source 1..20: mol_type = other DNA
agtcttatcacagttgcaag

SEQ ID NO: 5380 - DNA, 20 bp, synthetic construct
  source 1..20: mol_type = other DNA
tttattgtcccagtcttatc

SEQ ID NO: 5381 - DNA, 20 bp, synthetic construct
  source 1..20: mol_type = other DNA
tagggggccaatcttactct

SEQ ID NO: 5382 - DNA, 20 bp, synthetic construct
  source 1..20: mol_type = other DNA
gtgaggctcacactgattac

SEQ ID NO: 5383 - DNA, 20 bp, synthetic construct
  source 1..20: mol_type = other DNA
cacaggtacaatttgaccat

SEQ ID NO: 5384 - DNA, 20 bp, synthetic construct
  source 1..20: mol_type = other DNA
ttgacaattttcaacactgc

SEQ ID NO: 5385 - DNA, 20 bp, synthetic construct
  source 1..20: mol_type = other DNA
cctatggcattgcttgtgag

SEQ ID NO: 5386 - DNA, 20 bp, synthetic construct
  source 1..20: mol_type = other DNA
ctatggcattgcttgtgaga

SEQ ID NO: 5387 - DNA, 20 bp, synthetic construct
  source 1..20: mol_type = other DNA
gatgtgtgagtgtgattcct

SEQ ID NO: 5388 - DNA, 20 bp, synthetic construct
  source 1..20: mol_type = other DNA
aggaatcacactcacacatc

SEQ ID NO: 5389 - DNA, 20 bp, synthetic construct
  source 1..20: mol_type = other DNA
caaggaatcacactcacaca

SEQ ID NO: 5390 - DNA, 20 bp, synthetic construct
  source 1..20: mol_type = other DNA
tggggacattacctgggacc

SEQ ID NO: 5391 - DNA, 20 bp, synthetic construct
  source 1..20: mol_type = other DNA
ggtaatgtccccaaggaatc

SEQ ID NO: 5392 - DNA, 20 bp, synthetic construct
  source 1..20: mol_type = other DNA
aggtaatgtccccaaggaat

SEQ ID NO: 5393 - DNA, 20 bp, synthetic construct
  source 1..20: mol_type = other DNA
gggaccatttgtgacccaat

SEQ ID NO: 5394 - DNA, 20 bp, synthetic construct
  source 1..20: mol_type = other DNA
ctgattgggtcacaaatggt

SEQ ID NO: 5395 - DNA, 20 bp, synthetic construct
  source 1..20: mol_type = other DNA
gtgcctgtgtgtgcctaatc

SEQ ID NO: 5396 - DNA, 20 bp, synthetic construct
  source 1..20: mol_type = other DNA
gtgtgtgcctaatcgtcaag

SEQ ID NO: 5397 - DNA, 20 bp, synthetic construct
  source 1..20: mol_type = other DNA
tgacgattaggcacacacag

SEQ ID NO: 5398 - DNA, 20 bp, synthetic construct
  source 1..20: mol_type = other DNA
ggttgacactgattacacct

SEQ ID NO: 5399 - DNA, 20 bp, synthetic construct
  source 1..20: mol_type = other DNA
aagttaacaaaaggaatgtc

SEQ ID NO: 5400 - DNA, 20 bp, synthetic construct
  source 1..20: mol_type = other DNA
tgtttctggtttgtggcttc

SEQ ID NO: 5401 - DNA, 20 bp, synthetic construct
  source 1..20: mol_type = other DNA
tccatggctcagtgaacaaa

SEQ ID NO: 5402 - DNA, 20 bp, synthetic construct
  source 1..20: mol_type = other DNA
cttcaacattgggcttgcag

SEQ ID NO: 5403 - DNA, 26 bp, synthetic construct
  source 1..26: mol_type = other DNA
acacagctggatccctccctgggact

SEQ ID NO: 5404 - DNA, 20 bp, synthetic construct
  source 1..20: mol_type = other DNA
tccagatggtagctgaggtt

SEQ ID NO: 5405 - DNA, 20 bp, synthetic construct
  source 1..20: mol_type = other DNA
gtcccagagggaaacttgac

SEQ ID NO: 5406 - DNA, 24 bp, synthetic construct
  source 1..24: mol_type = other DNA
gctgaccaccagccaaaggggcac
